(19) United States
(12) Patent Application Publication
(10) Pub. No.: US 2025/0089724 A1
(43) Pub. Date: Mar. 20, 2025

(54) BACTERIOPHAGE HAVING BACTERIOLYSIS ACTIVITY ON XANTHOMONAS SPP.

(71) Applicants: KANEKA CORPORATION, Osaka (JP); RAKUNO GAKUEN UNIVERSITY, Hokkaido (JP); MITSUI & CO., LTD., Tokyo (JP)

(72) Inventors: Shinichi Yoshida, Shizuoka (JP); Nobuhiko Dojun, Shizuoka (JP); Mitsuaki Kitano, Hyogo (JP); Hidetomo Iwano, Hokkaido (JP); Hitoshi Kudo, Tokyo (JP)

(73) Assignees: KANEKA CORPORATION, Osaka (JP); RAKUNO GAKUEN UNIVERSITY, Hokkaido (JP); MITSUI & CO., LTD., Tokyo (JP)

(21) Appl. No.: 18/899,149

(22) Filed: Sep. 27, 2024

Related U.S. Application Data
(63) Continuation of application No. PCT/JP2023/013611, filed on Mar. 31, 2023.

(30) Foreign Application Priority Data
Mar. 31, 2022 (JP) 2022-059936
Mar. 31, 2022 (JP) 2022-060143
Mar. 31, 2022 (JP) 2022-060249
Mar. 31, 2022 (JP) 2022-060441
Mar. 31, 2022 (JP) 2022-060819
Mar. 31, 2022 (JP) 2022-060822
Mar. 31, 2022 (JP) 2022-060887
Mar. 31, 2022 (JP) 2022-060909
Mar. 31, 2022 (JP) 2022-061075
Sep. 29, 2022 (JP) 2022-156882
Sep. 29, 2022 (JP) 2022-156972
Sep. 29, 2022 (JP) 2022-157086
Mar. 16, 2023 (JP) 2023-041699
Mar. 16, 2023 (JP) 2023-041776
Mar. 16, 2023 (JP) 2023-041784
Mar. 16, 2023 (JP) 2023-041827

(51) Int. Cl. A01N 63/40; A01P 1/00; C12N 7/00; C12Q 1/04

(52) U.S. Cl. CPC A01N 63/40; A01P 1/00; C12N 7/00; C12Q 1/04; C12N 2795/00022

(57) ABSTRACT

To control plant diseases caused by Xanthomonas spp., a novel bacteriophage exhibiting bacteriolysis activity specifically on Xanthomonas spp. was isolated. Thus, developed and provided is a plant disease control composition containing the bacteriophage as an active ingredient. Provided are a bacteriolytic agent containing a bacteriophage that has a novel genomic DNA sequence and exhibits bacteriolysis activity specifically on Xanthomonas spp., and a plant disease control composition containing the same as an active ingredient.

### SEQUENCE LISTING

[0001] This application contains a sequence listing in computer readable form (File name: “B220246 Sequence.xml”; date of creation: Nov. 18, 2024; File size: 1.74 megabytes), which is incorporated herein by reference in its entirety and forms part of the disclosure.

### TECHNICAL FIELD

[0002] One or more embodiments of the present invention relate to a bacteriolytic agent composed of a bacteriophage, a composition for plant disease control comprising the same, and a method for controlling plant disease.

### BACKGROUND

[0003] A bacteriophage (herein often abbreviated simply as a “phage”) is a generic term for viruses that infect only bacteria. Many phages, also called bacteriolytic phages, are specifically attached to target bacteria as a host, then inject their own DNA, and are self-amplified utilizing the translational mechanism of the bacteria. Furthermore, the bacteria are lysed, and consequently, the amplified phages are diffused, and an infection into new target bacteria is repeated (Non-Patent Literature 1).

[0004] Many of the bacteria of the Xanthomonas genus are known to be pathogenic bacteria for diseases of plants, for example, various crops. In common customary control, a copper fungicide or an antibiotic has been used. However, there are drug effects, drug poisoning, as well as possible causes for the disruption of a bacterial lawn balance. Hence, recent interest has focused on a method using a phage as a new control method (Non-Patent Literature 2).

[0005] An example of a phage bacteriolytic to bacteria of the Xanthomonas genus is reported, for example, in Patent Literature 1 to 3 and Non-Patent Literature 2. However, the host range of the phages is extremely narrow. Hence, it is still important to search for a new phage and to find a phage having higher bacteriolytic ability.

### PATENT LITERATURE

[0006] Patent Literature 1: JP2016-32435A
[0007] Patent Literature 2: JP2021-102635A
[0008] Patent Literature 3: WO2017/113029

### Non-Patent Literature

[0009] Non-Patent Literature 1: Sharma S. et al., Folia Microbiol., 2017, 62:17-55
[0010] Non-Patent Literature 2: Nakayinga R. et al., BMC Microbiology, 2021, 21:291

### SUMMARY

[0011] The present inventors have aimed their attention at a bacteriophage. Differently from a conventional copper fungicide or antibiotic, a phage, which is a virus, is a natural product, and the manifestation of its drug poisoning has hitherto not been reported. Additionally, a phage has a very high specificity to a host, and thus, only targets bacteria of a specific genus or species, having an extremely limited influence on a bacterial lawn balance. Additionally, a phage is harmless to not only an animal such as a human but also a plant, and is very safe.

[0012] Accordingly, to inhibit damage causable to crops by a plant disease caused by bacteria of the Xanthomonas genus, a novel phage that exhibits bacteriolytic ability against bacteria of the Xanthomonas genus is isolated. Also provided is a composition comprising the phage as an active component, and to use the composition for disease control, the detection of pathogenic bacteria, and the like.

[0013] The present inventors have isolated a novel phage from natural dirty water and soil, using a method for detecting a bacteriolytic plaque formed on a soft agar medium having bacteria of the Xanthomonas genus cultured thereon, have evaluated the bacteriolytic ability of the phage against various bacteria of the Xanthomonas genus, and have analyzed the genomic sequence of the phage. Consequently, the phage has been revealed as having a novel genomic DNA sequence. One or more embodiments of the present invention have been completed on the basis of the above-described results of research and development, and specifically provides the following.

[0014] (1-1) A bacteriolytic agent consisting of a bacteriophage comprising, in the genomic DNA, a gene encoding a tail fiber protein having a recognizing ability for target bacteria, wherein the protein consists of the amino acid sequence of any one of the following (a) to (c): (a) the amino acid sequence of SEQ ID NO: 1; (b) the amino acid sequence having addition, deletion, and/or substitution of one or a plurality of amino acids in the amino acid sequence of SEQ ID NO: 1; (c) an amino acid sequence having a sequence identity of 90% or more to the amino acid sequence of SEQ ID NO: 1.

[0015] (1-2) The bacteriolytic agent according to (1-1), wherein the amino acid sequence of SEQ ID NO: 1 is the amino acid sequence of any one of SEQ ID NOs: 2 to 4.

[0016] (1-3) The bacteriolytic agent according to (1-1) or (1-2), wherein the gene consists of the nucleotide sequence of any one of the following (d) to (f): (d) the nucleotide sequence of any one of SEQ ID NOs: 5 to 7; (e) the nucleotide sequence having addition, deletion, and/or substitution of one or a plurality of nucleotides in the nucleotide sequence of any one of SEQ ID NOs: 5 to 7; (f) a nucleotide sequence having a sequence identity of 90% or more to the nucleotide sequence of any one of SEQ ID NOs: 5 to 7.

[0017] (1-4) The bacteriolytic agent according to any of (1-1) to (1-3), wherein the nucleotide sequence of the genomic DNA consists of the nucleotide sequence of any one of the following (g) to (k): (g) the nucleotide sequence of any one of SEQ ID NOs: 8 to 10; (h) the nucleotide sequence having addition, deletion, and/or substitution of one or a plurality of nucleotides in the nucleotide sequence other than the nucleotide sequence of the gene according to any of (1-1) to (1-3) within the nucleotide sequence of any one of SEQ ID NOs: 8 to 10; (i) a nucleotide sequence having a sequence identity of 80% or more to the nucleotide sequence other than the nucleotide sequence of the gene according to any of (1-1) to (1-3) within the nucleotide sequence of any one of SEQ ID NOs: 8 to 10; (j) the nucleotide sequence having addition, deletion, and/or substitution of one or a plurality of nucleotides in the nucleotide sequence of any one of SEQ ID NOs: 8 to 10; (k) a nucleotide sequence having a sequence identity of 90% or more to the nucleotide sequence of any one of SEQ ID NOs: 8 to 10.

[0018] (1-5) The bacteriolytic agent according to any of (1-1) to (1-4), wherein the bacteriolytic agent exhibits bacteriolytic ability against bacteria of the Xanthomonas genus.

[0019] (1-6) The bacteriolytic agent according to (1-5), wherein the bacteria of the Xanthomonas genus are at least one kind of bacteria selected from the group consisting of Xanthomonas arboricola, Xanthomonas campestris, Xanthomonas citri, Xanthomonas oryzae, and Xanthomonas cucurbitae.

[0020] (2-1) A bacteriolytic agent consisting of a bacteriophage comprising, in the genomic DNA, a gene encoding a tail fiber protein having a recognizing ability for target bacteria, wherein the protein consists of the amino acid sequence of any one of the following (a) and (b): (a) the amino acid sequence of SEQ ID NO: 11 or 45; (b) the amino acid sequence having substitution of one amino acid other than at positions 278 and 350 in the amino acid sequence of SEQ ID NO: 11.

[0021] (2-2) The bacteriolytic agent according to (2-1), wherein the gene consists of the nucleotide sequence of SEQ ID NO: 12 or 46.

[0022] (2-3) The bacteriolytic agent according to (2-1) or (2-2), wherein the nucleotide sequence of the genomic DNA consists of the nucleotide sequence of any one of the following (a) to (e): (a) the nucleotide sequence of SEQ ID NO: 13, 47, or 48; (b) the nucleotide sequence having addition, deletion, and/or substitution of one or a plurality of nucleotides in the nucleotide sequence other than the nucleotide sequence of the gene according to (2-1) or (2-2) within the nucleotide sequence of SEQ ID NO: 13, 47, or 48; (c) a nucleotide sequence having a sequence identity of 98.5% or more to the nucleotide sequence other than the nucleotide sequence of the gene according to (2-1) or (2-2) within the nucleotide sequence of SEQ ID NO: 13, 47, or 48; (d) the nucleotide sequence having addition, deletion, and/or substitution of one or a plurality of nucleotides in the nucleotide sequence of SEQ ID NO: 13, 47, or 48; (e) a nucleotide sequence having a sequence identity of 98.5% or more to the nucleotide sequence of SEQ ID NO: 13, 47, or 48.

[0023] (2-4) The bacteriolytic agent according to any of (2-1) to (2-3), wherein the bacteriolytic agent exhibits bacteriolytic ability against bacteria of the Xanthomonas genus.

[0024] (2-5) The bacteriolytic agent according to (2-4), wherein the bacteria of the Xanthomonas genus are at least one kind of bacteria selected from the group consisting of Xanthomonas arboricola, Xanthomonas campestris, Xanthomonas citri, Xanthomonas oryzae, and Xanthomonas cucurbitae.

[0025] (3-1) A bacteriolytic agent consisting of a bacteriophage having a genomic DNA sequence comprising the nucleotide sequence of any one of the following (a) to (c): (a) the nucleotide sequence of SEQ ID NO: 14; (b) the nucleotide sequence having addition, deletion, and/or substitution of one or a plurality of nucleotides in the nucleotide sequence of SEQ ID NO: 14; (c) a nucleotide sequence having a sequence identity of 90% or more to the nucleotide sequence of SEQ ID NO: 14.

[0026] (3-2) The bacteriolytic agent according to (3-1), wherein the bacteriolytic agent exhibits bacteriolytic ability against bacteria of the Xanthomonas genus.

[0027] (3-3) The bacteriolytic agent according to (3-2), wherein the bacteria of the Xanthomonas genus are Xanthomonas arboricola.

[0028] (4-1) A bacteriolytic agent consisting of a bacteriophage comprising, in the genomic DNA, a gene encoding a tail fiber protein having a recognizing ability for target bacteria, wherein the protein consists of the amino acid sequence of any one of the following (a) to (c): (a) the amino acid sequence of SEQ ID NO: 15; (b) the amino acid sequence having addition, deletion, and/or substitution of one or a plurality of amino acids in the amino acid sequence of SEQ ID NO: 15; (c) an amino acid sequence having a sequence identity of 90% or more to the amino acid sequence of SEQ ID NO: 15.

[0029] (4-2) The bacteriolytic agent according to (4-1), wherein the gene consists of the nucleotide sequence of any one of the following (d) to (f): (d) the nucleotide sequence of SEQ ID NO: 16; (e) the nucleotide sequence having addition, deletion, and/or substitution of one or a plurality of nucleotides in the nucleotide sequence of SEQ ID NO: 16; (f) a nucleotide sequence having a sequence identity of 90% or more to the nucleotide sequence of SEQ ID NO: 16.

[0030] (4-3) The bacteriolytic agent according to (4-1) or (4-2), wherein the nucleotide sequence of the genomic DNA consists of the nucleotide sequence of any one of the following (g) to (k): (g) the nucleotide sequence of SEQ ID NO: 17; (h) the nucleotide sequence having addition, deletion, and/or substitution of one or a plurality of nucleotides in the nucleotide sequence other than the nucleotide sequence of the gene according to (4-1) or (4-2) within the nucleotide sequence of SEQ ID NO: 17; (i) a nucleotide sequence having a sequence identity of 80% or more to the nucleotide sequence other than the nucleotide sequence of the gene according to (4-1) or (4-2) within the nucleotide sequence of SEQ ID NO: 17; (j) the nucleotide sequence having addition, deletion, and/or substitution of one or a plurality of nucleotides in the nucleotide sequence of SEQ ID NO: 17; (k) a nucleotide sequence having a sequence identity of 90% or more to the nucleotide sequence of SEQ ID NO: 17.

[0031] (4-4) The bacteriolytic agent according to any of (4-1) to (4-3), wherein the bacteriolytic agent exhibits bacteriolytic ability against bacteria of the Xanthomonas genus.

[0032] (4-5) The bacteriolytic agent according to (4-4), wherein the bacteria of the Xanthomonas genus are Xanthomonas arboricola.

[0033] (5-1) A bacteriolytic agent comprising a bacteriophage having a genomic DNA sequence comprising the nucleotide sequence of any one of the following (a) to (c): (a) the nucleotide sequence of SEQ ID NO: 18 or 19; (b) the nucleotide sequence having addition, deletion, and/or substitution of one or a plurality of nucleotides in the nucleotide sequence of SEQ ID NO: 18 or 19; (c) a nucleotide sequence having a sequence identity of 90% or more to the nucleotide sequence of SEQ ID NO: 18 or 19.

[0034] (5-2) The bacteriolytic agent according to (5-1), wherein the bacteriolytic agent exhibits bacteriolytic ability against bacteria of the Xanthomonas genus.

[0035] (5-3) The bacteriolytic agent according to (5-2), wherein the bacteria of the Xanthomonas genus are Xanthomonas arboricola.

[0036] (6-1) A bacteriolytic agent consisting of a bacteriophage comprising, in the genomic DNA, a gene encoding a protein consisting of the amino acid sequence of any one of the following (a) to (c): (a) the amino acid sequence of SEQ ID NO: 21; (b) the amino acid sequence having addition, deletion, and/or substitution of one or a plurality of amino acids in the amino acid sequence of SEQ ID NO: 21; (c) an amino acid sequence having a sequence identity of 90% or more to the amino acid sequence of SEQ ID NO: 21.

[0037] (6-2) The bacteriolytic agent according to (6-1), wherein the gene consists of the nucleotide sequence of any one of the following (d) to (f): (d) the nucleotide sequence of SEQ ID NO: 22; (e) the nucleotide sequence having addition, deletion, and/or substitution of one or a plurality of nucleotides in the nucleotide sequence of SEQ ID NO: 22; (f) a nucleotide sequence having a sequence identity of 90% or more to the nucleotide sequence of SEQ ID NO: 22.

[0038] (6-3) The bacteriolytic agent according to (6-1) or (6-2), wherein the nucleotide sequence of the genomic DNA consists of the nucleotide sequence of any one of the following (g) to (k): (g) the nucleotide sequence of SEQ ID NO: 23; (h) the nucleotide sequence having addition, deletion, and/or substitution of one or a plurality of nucleotides in the nucleotide sequence other than the nucleotide sequence of the gene according to (6-1) or (6-2) within the nucleotide sequence of SEQ ID NO: 23; (i) a nucleotide sequence having a sequence identity of 95% or more to the nucleotide sequence other than the gene according to (6-1) or (6-2) within the nucleotide sequence of SEQ ID NO: 23; (j) the nucleotide sequence having addition, deletion, and/or substitution of one or a plurality of nucleotides in the nucleotide sequence of SEQ ID NO: 23; (k) a nucleotide sequence having a sequence identity of 95% or more to the nucleotide sequence of SEQ ID NO: 23.

[0039] (6-4) The bacteriolytic agent according to any of (6-1) to (6-3), wherein the bacteriolytic agent exhibits bacteriolytic ability against bacteria of the Xanthomonas genus.

[0040] (6-5) The bacteriolytic agent according to (6-4), wherein the bacteria of the Xanthomonas genus are Xanthomonas arboricola.

[0041] (7-1) A bacteriolytic agent consisting of a bacteriophage comprising, in the genomic DNA, the following: a gene encoding a tail tubular protein A consisting of the amino acid sequence of any one of the following (a) to (c) and having a recognizing ability for a target bacteria; and a gene encoding a tail tubular protein B consisting of the amino acid sequence of any one of the following (d) to (f) and having a recognizing ability for a target bacteria: (a) the amino acid sequence of SEQ ID NO: 24, 49, or 60; (b) the amino acid sequence having addition, deletion, and/or substitution of one or a plurality of amino acids in the amino acid sequence of SEQ ID NO: 24 or 49; (c) an amino acid sequence having a sequence identity of 97% or more to the amino acid sequence of SEQ ID NO: 24 or 49; (d) the amino acid sequence of SEQ ID NO: 57, 50, or 61; (e) the amino acid sequence having addition, deletion, and/or substitution of one or a plurality of amino acids in the amino acid sequence of SEQ ID NO: 57 or 50; (f) an amino acid sequence having a sequence identity of 97% or more to the amino acid sequence of SEQ ID NO: 57 or 50.

[0042] (7-2) The bacteriolytic agent according to (7-1), wherein the gene encoding the tail tubular protein A consists of the nucleotide sequence of any one of the following (g) to (i): (g) the nucleotide sequence of SEQ ID NO: 26 or 51; (h) the nucleotide sequence having addition, deletion, and/or substitution of one or a plurality of nucleotides in the nucleotide sequence of SEQ ID NO: 26 or 51; (i) a nucleotide sequence having a sequence identity of 97% or more to the nucleotide sequence of SEQ ID NO: 26 or 51.

[0043] (7-3) The bacteriolytic agent according to (7-1) or (7-2), wherein the gene encoding the tail tubular protein B consists of the nucleotide sequence of any one of the following (j) to (1): (j) the nucleotide sequence of SEQ ID NO: 27 or 52; (k) the nucleotide sequence having addition, deletion, and/or substitution of one or a plurality of nucleotides in the nucleotide sequence of SEQ ID NO: 27 or 52; (1) a nucleotide sequence having a sequence identity of 97% or more to the nucleotide sequence of SEQ ID NO: 27 or 52.

[0044] (7-4) The bacteriolytic agent according to any of (7-1) to (7-3), wherein the nucleotide sequence of the genomic DNA consists of the nucleotide sequence of any one of the following (m) to (q): (m) the nucleotide sequence of SEQ ID NO: 28, 29, or 53; (n) the nucleotide sequence having addition, deletion, and/or substitution of one or a plurality of nucleotides in the nucleotide sequence other than the nucleotide sequence of the gene according to any of (7-1) to (7-3) within the nucleotide sequence of SEQ ID NO: 28, 29, or 53; (o) a nucleotide sequence having a sequence identity of 95% or more to the nucleotide sequence other than the gene according to any of (7-1) to (7-3) within the nucleotide sequence of SEQ ID NO: 28, 29, or 53; (p) the nucleotide sequence having addition, deletion, and/or substitution of one or a plurality of nucleotides in the nucleotide sequence of SEQ ID NO: 28, 29, or 53; (q) a nucleotide sequence having a sequence identity of 95% or more to the nucleotide sequence of SEQ ID NO: 28, 29, or 53.

[0045] (7-5) The bacteriolytic agent according to any of (7-1) to (7-4), wherein the bacteriolytic agent exhibits bacteriolytic ability against bacteria of the Xanthomonas genus.

[0046] (7-6) The bacteriolytic agent according to (7-5), wherein the bacteria of the Xanthomonas genus are Xanthomonas arboricola or Xanthomonas campestris.

[0047] (8-1) A bacteriolytic agent consisting of a bacteriophage having a genomic DNA sequence comprising the nucleotide sequence of any one of the following (a) to (c): (a) the nucleotide sequence of any one of SEQ ID NOs: 32 to 36; (b) the nucleotide sequence having addition, deletion, and/or substitution of one or a plurality of nucleotides in the nucleotide sequence of any one of SEQ ID NOs: 32 to 36; (c) a nucleotide sequence having a sequence identity of 90% or more to the nucleotide sequence of any one of SEQ ID NOs: 32 to 36.

[0048] (8-2) The bacteriolytic agent according to (8-1), wherein the bacteriolytic agent exhibits bacteriolytic ability against bacteria of the Xanthomonas genus.

[0049] (8-3) The bacteriolytic agent according to (8-2), wherein the bacteria of the Xanthomonas genus are Xanthomonas arboricola.

[0050] (9-1) A bacteriolytic agent consisting of a bacteriophage comprising, in the genomic DNA, the following: a gene encoding a tail tubular protein A consisting of the amino acid sequence of any one of the following (a) to (c) and having a recognizing ability for a target bacteria; and a gene encoding a tail tubular protein B consisting of the amino acid sequence of any one of the following (d) to (f) and having a recognizing ability for a target bacteria: (a) the amino acid sequence of SEQ ID NO: 37; (b) the amino acid sequence having addition, deletion, and/or substitution of one or a plurality of amino acids in the amino acid sequence of SEQ ID NO: 37; (c) an amino acid sequence having a sequence identity of 92% or more to the amino acid sequence of SEQ ID NO: 37; (d) the amino acid sequence of SEQ ID NO: 38, 54, or 59; (e) the amino acid sequence having addition, deletion, and/or substitution of one or a plurality of amino acids in the amino acid sequence of SEQ ID NO: 38 or 54; (f) an amino acid sequence having a sequence identity of 92% or more to the amino acid sequence of SEQ ID NO: 38 or 54.

[0051] (9-2) The bacteriolytic agent according to (9-1), wherein the gene encoding the tail tubular protein A consists of the nucleotide sequence of any one of the following (g) to (i): (g) the nucleotide sequence of SEQ ID NO: 39; (h) the nucleotide sequence having addition, deletion, and/or substitution of one or a plurality of nucleotides in the nucleotide sequence of SEQ ID NO: 39; (i) a nucleotide sequence having a sequence identity of 90% or more to the nucleotide sequence of SEQ ID NO: 39.

[0052] (9-3) The bacteriolytic agent according to (9-1) or (9-2), wherein the gene encoding the tail tubular protein B consists of the nucleotide sequence of any one of the following (j) to (1): (j) the nucleotide sequence of SEQ ID NO: 40 or 55; (k) the nucleotide sequence having addition, deletion, and/or substitution of one or a plurality of nucleotides in the nucleotide sequence of SEQ ID NO: 40 or 55; (1) a nucleotide sequence having a sequence identity of 90% or more to the nucleotide sequence of SEQ ID NO: 40 or 55.

[0053] (9-4) The bacteriolytic agent according to any of (9-1) to (9-3), wherein the nucleotide sequence of the genomic DNA consists of the nucleotide sequence of any one of the following (m) to (q): (m) the nucleotide sequence of SEQ ID NO: 41 or 56; (n) the nucleotide sequence having addition, deletion, and/or substitution of one or a plurality of nucleotides in the nucleotide sequence other than the nucleotide sequence of the gene according to any of (9-1) to (9-3) within the nucleotide sequence of SEQ ID NO: 41 or 56; (o) a nucleotide sequence having a sequence identity of 80% or more to the nucleotide sequence other than the nucleotide sequence of the gene according to any of (9-1) to (9-3) within the nucleotide sequence of SEQ ID NO: 41 or 56; (p) the nucleotide sequence having addition, deletion, and/or substitution of one or a plurality of nucleotides in the nucleotide sequence of SEQ ID NO: 41 or 56; (q) a nucleotide sequence having a sequence identity of 90% or more to the nucleotide sequence of SEQ ID NO: 41 or 56.

[0054] (9-5) The bacteriolytic agent according to any of (9-1) to (9-4), wherein the bacteriolytic agent exhibits bacteriolytic ability against bacteria of the Xanthomonas genus.

[0055] (9-6) The bacteriolytic agent according to (9-5), wherein the bacteria of the Xanthomonas genus are at least one kind of bacteria selected from the group consisting of Xanthomonas arboricola, Xanthomonas campestris, and Xanthomonas citri.

[0056] (10-1) A bacteriolytic agent consisting of a bacteriophage comprising, in the genomic DNA, a gene encoding a tail fiber protein having a recognizing ability for target bacteria, wherein the protein consists of the amino acid sequence of any one of the following (a) to (c): (a) the amino acid sequence of SEQ ID NO: 42; (b) the amino acid sequence having addition, deletion, and/or substitution of one or a plurality of amino acids in the amino acid sequence of SEQ ID NO: 42; (c) an amino acid sequence having a sequence identity of 90% or more to the amino acid sequence of SEQ ID NO: 42.

[0057] (10-2) The bacteriolytic agent according to (10-1), wherein the gene consists of the nucleotide sequence of any one of the following (d) to (f): (d) the nucleotide sequence of SEQ ID NO: 43; (e) the nucleotide sequence having addition, deletion, and/or substitution of one or a plurality of nucleotides in the nucleotide sequence of SEQ ID NO: 43; (f) a nucleotide sequence having a sequence identity of 90% or more to the nucleotide sequence of SEQ ID NO: 43.

[0058] (10-3) The bacteriolytic agent according to (10-1) or (10-2), wherein the nucleotide sequence of the genomic DNA consists of the nucleotide sequence of any one of the following (g) to (k): (g) the nucleotide sequence of SEQ ID NO: 44; (h) the nucleotide sequence having addition, deletion, and/or substitution of one or a plurality of nucleotides in the nucleotide sequence other than the nucleotide sequence of the gene according to (10-1) or (10-2) within the nucleotide sequence of SEQ ID NO: 44; (i) a nucleotide sequence having a sequence identity of 80% or more to the nucleotide sequence other than the nucleotide sequence of the gene according to (10-1) or (10-2) within the nucleotide sequence of SEQ ID NO: 44; (j) the nucleotide sequence having addition, deletion, and/or substitution of one or a plurality of nucleotides in the nucleotide sequence of SEQ ID NO: 44; (k) a nucleotide sequence having a sequence identity of 90% or more to the nucleotide sequence of SEQ ID NO: 44.

[0059] (10-4) The bacteriolytic agent according to any of (10-1) to (10-3), wherein the bacteriolytic agent exhibits bacteriolytic ability against bacteria of the Xanthomonas genus.

[0060] (10-5) The bacteriolytic agent according to (10-4), wherein the bacteria of the Xanthomonas genus are at least one kind of bacteria selected from the group consisting of Xanthomonas arboricola, Xanthomonas campestris, and Xanthomonas citri.

[0061] [1-1] A bacteriolytic agent consisting of a bacteriophage comprising, in the genomic DNA, a gene encoding a tail fiber protein having a recognizing ability for target bacteria, wherein the protein consists of the amino acid sequence of any one of the following (a) to (d): (a) the amino acid sequence of any one selected from the group consisting of SEQ ID NOs: 11, 45, 42, and 1; (b) the amino acid sequence having addition, deletion, and/or substitution of one or a plurality of amino acids in the amino acid sequence of SEQ ID NO: 42 or 1; and (c) an amino acid sequence having a sequence identity of 90% or more to the amino acid sequence of SEQ ID NO: 42 or 1; or (d) the amino acid sequence having substitution of one amino acid other than at positions 278 and 350 in the amino acid sequence of SEQ ID NO: 11.

[0062] [1-2] A bacteriolytic agent consisting of a bacteriophage comprising, in the genomic DNA, the following: a gene consisting of the amino acid sequence of any one of the following (e) to (g); and a gene consisting of the amino acid sequence of any one of the following (h) to (j), wherein the genes are respectively a gene encoding a tail tubular protein A and a gene encoding a tail tubular protein B, both proteins having a recognizing ability for target bacteria: (e) the amino acid sequence of SEQ ID NO: 24, 49, or 60; (f) the amino acid sequence having addition, deletion, and/or substitution of one or a plurality of amino acids in the amino acid sequence of SEQ ID NO: 24 or 49; (g) an amino acid sequence having a sequence identity of 97% or more to the amino acid sequence of SEQ ID NO: 24 or 49; (h) the amino acid sequence of SEQ ID NO: 57, 50, or 61; (i) the amino acid sequence having addition, deletion, and/or substitution of one or a plurality of amino acids in the amino acid sequence of SEQ ID NO: 57 or 50; or (j) an amino acid sequence having a sequence identity of 97% or more to the amino acid sequence of SEQ ID NO: 57 or 50.

[0063] [1-3] A bacteriolytic agent consisting of a bacteriophage comprising, in the genomic DNA, the following: a gene consisting of the amino acid sequence of any one of the following (k) to (m); and a gene consisting of the amino acid sequence of any one of the following (n) to (p), wherein the genes are respectively a gene encoding a tail tubular protein A and a gene encoding a tail tubular protein B, both proteins having a recognizing ability for target bacteria: (k) the amino acid sequence of SEQ ID NO: 37; (1) the amino acid sequence having addition, deletion, and/or substitution of one or a plurality of amino acids in the amino acid sequence of SEQ ID NO: 37; (m) an amino acid sequence having a sequence identity of 92% or more to the amino acid sequence of SEQ ID NO: 37; (n) the amino acid sequence of SEQ ID NO: 38, 54, or 59; (o) the amino acid sequence having addition, deletion, and/or substitution of one or a plurality of amino acids in the amino acid sequence of SEQ ID NO: 38 or 54; or (p) an amino acid sequence having a sequence identity of 92% or more to the amino acid sequence of SEQ ID NO: 38 or 54.

[0064] [1-4] The bacteriolytic agent according to [1-1], wherein the amino acid sequence of SEQ ID NO: 1 is the amino acid sequence of any one of SEQ ID NOs: 2 to 4.

[0065] [1-5] The bacteriolytic agent according to [1-1], wherein the gene consists of the nucleotide sequence of any one of the following (1) to (3): (1) the nucleotide sequence of any one selected from the group consisting of SEQ ID NOs: 12, 46, 43, and 5 to 7; (2) the nucleotide sequence having addition, deletion, and/or substitution of one or a plurality of nucleotides in the nucleotide sequence of any one selected from the group consisting of SEQ ID NOs: 43 and 5 to 7; or (3) a nucleotide sequence having a sequence identity of 90% or more to the nucleotide sequence of any one selected from the group consisting of SEQ ID NOs: 43 and 5 to 7.

[0066] [1-6] The bacteriolytic agent according to [1-5], wherein the nucleotide sequence of the genomic DNA consists of the nucleotide sequence of any one of the following (1′) to (7′): (1′) the nucleotide sequence of any one selected from the group consisting of SEQ ID NOs: 13, 47, 48, 44, and 8 to 10; (2′) the nucleotide sequence having addition, deletion, and/or substitution of one or a plurality of nucleotides in the nucleotide sequence other than the gene according to [1-5] within the nucleotide sequence of any one selected from the group consisting of SEQ ID NOs: 13, 47, 48, 44, and 8 to 10; (3′) a nucleotide sequence having a sequence identity of 80% or more to the nucleotide sequence other than the gene according to [1-5] within the nucleotide sequence of any one selected from the group consisting of SEQ ID NOs: 44 and 8 to 10; (4′) a nucleotide sequence having a sequence identity of 98.5% or more to the nucleotide sequence other than the gene according to [1-5] within the nucleotide sequence of SEQ ID NO: 13, 47, or 48; (5′) the nucleotide sequence having addition, deletion, and/or substitution of one or a plurality of nucleotides in the nucleotide sequence of any one selected from the group consisting of SEQ ID NOs: 13, 47, 48, 44, and 8 to 10; or (6′) a nucleotide sequence having a sequence identity of 90% or more to the nucleotide sequence of any one selected from the group consisting of SEQ ID NOs: 44 and 8 to 10; (7′) a nucleotide sequence having a sequence identity of 98.5% or more to the nucleotide sequence of SEQ ID NO: 13, 47, or 48.

[0067] [1-7] The bacteriolytic agent according to [1-2], wherein the gene encoding the tail tubular protein A consists of the nucleotide sequence of any one of the following (4) to (6): (4) the nucleotide sequence of SEQ ID NO: 26 or 51; (5) the nucleotide sequence having addition, deletion, and/or substitution of one or a plurality of nucleotides in the nucleotide sequence of SEQ ID NO: 26 or 51; or (6) a nucleotide sequence having a sequence identity of 97% or more to the nucleotide sequence of SEQ ID NO: 26 or 51.

[0068] [1-8] The bacteriolytic agent according to [1-2] or [1-7], wherein the gene encoding the tail tubular protein B consists of the nucleotide sequence of any one of the following (7) to (9): (7) the nucleotide sequence of SEQ ID NO: 27 or 52; (8) the nucleotide sequence having addition, deletion, and/or substitution of one or a plurality of nucleotides in the nucleotide sequence of SEQ ID NO: 27 or 52; or (9) a nucleotide sequence having a sequence identity of 97% or more to the nucleotide sequence of SEQ ID NO: 27 or 52.

[0069] [1-9] The bacteriolytic agent according to [1-2], wherein the nucleotide sequence of the genomic DNA consists of the nucleotide sequence of any one of the following (8′) to (12′): (8′) the nucleotide sequence of SEQ ID NO: 28, 29, or 53; (9′) the nucleotide sequence having addition, deletion, and/or substitution of one or a plurality of nucleotides in the nucleotide sequence other than the gene according to [1-2] within the nucleotide sequence of SEQ ID NO: 28, 29, or 53; (10′) a nucleotide sequence having a sequence identity of 95% or more to the nucleotide sequence other than the gene according to [1-2] within the nucleotide sequence of SEQ ID NO: 28, 29, or 53; (11′) the nucleotide sequence having addition, deletion, and/or substitution of one or a plurality of nucleotides in the nucleotide sequence of SEQ ID NO: 28, 29, or 53; or (12′) a nucleotide sequence having a sequence identity of 95% or more to the nucleotide sequence of SEQ ID NO: 28, 29, or 53.

[0070] [1-10] The bacteriolytic agent according to [1-3], wherein the gene encoding the tail tubular protein A consists of the nucleotide sequence of any one of the following (10) to (12): (10) the nucleotide sequence of SEQ ID NO: 39; (11) the nucleotide sequence having addition, deletion, and/or substitution of one or a plurality of nucleotides in the nucleotide sequence of SEQ ID NO: 39; or (12) a nucleotide sequence having a sequence identity of 90% or more to the nucleotide sequence of SEQ ID NO: 39.

[0071] [1-11] The bacteriolytic agent according to [1-3] or [1-10], wherein the gene encoding the tail tubular protein B consists of the nucleotide sequence of any one of the following (13) to (15): (13) the nucleotide sequence of SEQ ID NO: 40 or 55; (14) the nucleotide sequence having addition, deletion, and/or substitution of one or a plurality of nucleotides in the nucleotide sequence of SEQ ID NO: 40 or 55; or (15) a nucleotide sequence having a sequence identity of 90% or more to the nucleotide sequence of SEQ ID NO: 40 or 55.

[0072] [1-12] The bacteriolytic agent according to [1-3], wherein the nucleotide sequence of the genomic DNA consists of the nucleotide sequence of any one of the following (13′) to (17′): (13′) the nucleotide sequence of SEQ ID NO: 41 or 56; (14′) the nucleotide sequence having addition, deletion, and/or substitution of one or a plurality of nucleotides in the nucleotide sequence other than the gene according to [1-3] within the nucleotide sequence of SEQ ID NO: 41 or 56; (15′) a nucleotide sequence having a sequence identity of 80% or more to the nucleotide sequence other than the gene according to [1-3] within the nucleotide sequence of SEQ ID NO: 41 or 56; (16′) the nucleotide sequence having addition, deletion, and/or substitution of one or a plurality of nucleotides in the nucleotide sequence of SEQ ID NO: 41 or 56; or (17′) a nucleotide sequence having a sequence identity of 90% or more to the nucleotide sequence of SEQ ID NO: 41 or 56.

[0073] [1-13] The bacteriolytic agent according to any of [1-1] to [1-12], wherein the bacteriolytic agent exhibits bacteriolytic ability against bacteria of the Xanthomonas genus.

[0074] [2-1] A bacteriolytic agent consisting of a bacteriophage comprising, in the genomic DNA, the following: a gene consisting of the amino acid sequence of any one of the following (a) to (c); and a gene consisting of the amino acid sequence of any one of the following (d) to (f), wherein the genes are respectively a gene encoding a tail tubular protein A and a gene encoding a tail tubular protein B, both proteins having a recognizing ability for target bacteria: (a) the amino acid sequence of SEQ ID NO: 24, 49, or 60; (b) the amino acid sequence having addition, deletion, and/or substitution of one or a plurality of amino acids in the amino acid sequence of SEQ ID NO: 24 or 49; (c) an amino acid sequence having a sequence identity of 97% or more to the amino acid sequence of SEQ ID NO: 24 or 49; (d) the amino acid sequence of SEQ ID NO: 57, 50, or 61; (e) the amino acid sequence having addition, deletion, and/or substitution of one or a plurality of amino acids in the amino acid sequence of SEQ ID NO: 57 or 50; or (f) an amino acid sequence having a sequence identity of 97% or more to the amino acid sequence of SEQ ID NO: 57 or 50.

[0075] [2-2] A bacteriolytic agent consisting of a bacteriophage comprising, in the genomic DNA, a gene encoding a tail fiber protein having a recognizing ability for target bacteria, wherein the protein consists of the amino acid sequence of any one of the following (g) to (j): (g) the amino acid sequence of any one selected from the group consisting of SEQ ID NOs: 1, 11, 45, 15, and 42; (h) the amino acid sequence having addition, deletion, and/or substitution of one or a plurality of amino acids in the amino acid sequence of any one selected from the group consisting of SEQ ID NOs: 1, 11, 15, and 42; (i) an amino acid sequence having a sequence identity of 90% or more to the amino acid sequence of any one selected from the group consisting of SEQ ID NOs: 1, 11, 15, and 42; or (j) the amino acid sequence having substitution of one amino acid other than at positions 278 and 350 in the amino acid sequence of SEQ ID NO: 11.

[0076] [2-3] A bacteriolytic agent consisting of a bacteriophage comprising, in the genomic DNA, the following: a gene consisting of the amino acid sequence of any one of the following (k) to (m); and a gene consisting of the amino acid sequence of any one of the following (n) to (p), wherein the genes are respectively a gene encoding a tail tubular protein A and a gene encoding a tail tubular protein B, both proteins having a recognizing ability for target bacteria: (k) the amino acid sequence of SEQ ID NO: 37; (1) the amino acid sequence having addition, deletion, and/or substitution of one or a plurality of amino acids in the amino acid sequence of SEQ ID NO: 37; (m) an amino acid sequence having a sequence identity of 92% or more to the amino acid sequence of SEQ ID NO: 37; (n) the amino acid sequence of SEQ ID NO: 38, 54, or 59; (o) the amino acid sequence having addition, deletion, and/or substitution of one or a plurality of amino acids in the amino acid sequence of SEQ ID NO: 38 or 54; or (p) an amino acid sequence having a sequence identity of 92% or more to the amino acid sequence of SEQ ID NO: 38 or 54.

[0077] [2-4] A bacteriolytic agent consisting of a bacteriophage comprising, in the genomic DNA, a gene encoding a protein consisting of the amino acid sequence of any one of the following (q) to (s): (q) the amino acid sequence of SEQ ID NO: 21; (r) the amino acid sequence having addition, deletion, and/or substitution of one or a plurality of amino acids in the amino acid sequence of SEQ ID NO: 21; or(s) an amino acid sequence having a sequence identity of 90% or more to the amino acid sequence of SEQ ID NO: 21.

[0078] [2-5] A bacteriolytic agent consisting of a bacteriophage having a genomic DNA sequence comprising the nucleotide sequence of any one of the following (1′) to (3′): (1′) the nucleotide sequence of any one selected from the group consisting of SEQ ID NOs: 14, 18, 19, and 32 to 36; (2′) the nucleotide sequence having addition, deletion, and/or substitution of one or a plurality of nucleotides in the nucleotide sequence of any one selected from the group consisting of SEQ ID NOs: 14, 18, 19, and 32 to 36; or (3′) a nucleotide sequence having a sequence identity of 90% or more to the nucleotide sequence of any one selected from the group consisting of SEQ ID NOs: 14, 18, 19, and 32 to 36.

[0079] [2-6] The bacteriolytic agent according to [2-1], wherein the nucleotide sequence of the genomic DNA consists of the nucleotide sequence of any one of the following (4′) to (8′): (4′) the nucleotide sequence of SEQ ID NO: 28, 29, or 53; (5′) the nucleotide sequence having addition, deletion, and/or substitution of one or a plurality of nucleotides in the nucleotide sequence other than the gene according to [2-2] within the nucleotide sequence of SEQ ID NO: 28, 29, or 53; (6′) a nucleotide sequence having a sequence identity of 95% or more to the nucleotide sequence other than the gene according to [2-2] within the nucleotide sequence of SEQ ID NO: 28, 29, or 53; (7′) the nucleotide sequence having addition, deletion, and/or substitution of one or a plurality of nucleotides in the nucleotide sequence of SEQ ID NO: 28, 29, or 53; or (8′) a nucleotide sequence having a sequence identity of 95% or more to the nucleotide sequence of SEQ ID NO: 28, 29, or 53.

[0080] [2-7] The bacteriolytic agent according to any of [2-1] to [2-6], wherein the bacteriolytic agent exhibits bacteriolytic ability against bacteria of the Xanthomonas genus.

[0081] [3-1] A bacteriolytic agent consisting of a bacteriophage having a genomic DNA sequence comprising the nucleotide sequence of any one of the following (1′) to (3′): (1′) the nucleotide sequence of any one selected from the group consisting of SEQ ID NOs: 32 to 36, 14, 18, and 19; (2′) the nucleotide sequence having addition, deletion, and/or substitution of one or a plurality of nucleotides in the nucleotide sequence of any one selected from the group consisting of SEQ ID NOs: 32 to 36, 14, 18, and 19; or (3′) a nucleotide sequence having a sequence identity of 90% or more to the nucleotide sequence of any one selected from the group consisting of SEQ ID NOs: 32 to 36, 14, 18, and 19.

[0082] [3-2] A bacteriolytic agent consisting of a bacteriophage comprising, in the genomic DNA, a gene encoding a tail fiber protein having a recognizing ability for target bacteria, wherein the protein consists of the amino acid sequence of any one of the following (a) to (c): (a) the amino acid sequence of SEQ ID NO: 15; (b) the amino acid sequence having addition, deletion, and/or substitution of one or a plurality of amino acids in the amino acid sequence of SEQ ID NO: 15; or (c) an amino acid sequence having a sequence identity of 90% or more to the amino acid sequence of SEQ ID NO: 15.

[0083] [3-3] A bacteriolytic agent consisting of a bacteriophage comprising, in the genomic DNA, a gene encoding a protein consisting of the amino acid sequence of any one of the following (d) to (f): (d) the amino acid sequence of SEQ ID NO: 21; (e) the amino acid sequence having addition, deletion, and/or substitution of one or a plurality of amino acids in the amino acid sequence of SEQ ID NO: 21; or (f) an amino acid sequence having a sequence identity of 90% or more to the amino acid sequence of SEQ ID NO: 21.

[0084] [3-4] The bacteriolytic agent according to [3-2], wherein the gene consists of the nucleotide sequence of any one of the following (1) to (3): (1) the nucleotide sequence of SEQ ID NO: 16; (2) the nucleotide sequence having addition, deletion, and/or substitution of one or a plurality of nucleotides in the nucleotide sequence of SEQ ID NO: 16; or (3) a nucleotide sequence having a sequence identity of 90% or more to the nucleotide sequence of SEQ ID NO: 16.

[0085] [3-5] The bacteriolytic agent according to [3-2], wherein the nucleotide sequence of the genomic DNA consists of the nucleotide sequence of any one of the following (4′) to (8′): (4′) the nucleotide sequence of SEQ ID NO: 17; (5′) the nucleotide sequence having addition, deletion, and/or substitution of one or a plurality of nucleotides in the nucleotide sequence other than the gene according to [3-2] within the nucleotide sequence of SEQ ID NO: 17; (6′) a nucleotide sequence having a sequence identity of 80% or more to the nucleotide sequence other than the gene according to [3-2] within the nucleotide sequence of SEQ ID NO: 17; (7′) the nucleotide sequence having addition, deletion, and/or substitution of one or a plurality of nucleotides in the nucleotide sequence of SEQ ID NO: 17; or (8′) a nucleotide sequence having a sequence identity of 90% or more to the nucleotide sequence of SEQ ID NO: 17. [3-6] The bacteriolytic agent according to [3-3], wherein the gene consists of the nucleotide sequence of any of the following (4) to (6): (4) the nucleotide sequence of SEQ ID NO: 22; (5) the nucleotide sequence having addition, deletion, and/or substitution of one or a plurality of nucleotides in the nucleotide sequence of SEQ ID NO: 22; or (6) a nucleotide sequence having a sequence identity of 90% or more to the nucleotide sequence of SEQ ID NO: 22.

[0086] [3-7] The bacteriolytic agent according to [3-3], wherein the nucleotide sequence of the genomic DNA consists of the nucleotide sequence of any one of the following (9′) to (13′): (9′) the nucleotide sequence of SEQ ID NO: 23; (10′) the nucleotide sequence having addition, deletion, and/or substitution of one or a plurality of nucleotides in the nucleotide sequence other than the gene according to [3-3] within the nucleotide sequence of SEQ ID NO: 23; (11′) a nucleotide sequence having a sequence identity of 95% or more to the nucleotide sequence other than the gene according to [3-3] within the nucleotide sequence of SEQ ID NO: 23; (12′) the nucleotide sequence having addition, deletion, and/or substitution of one or a plurality of nucleotides in the nucleotide sequence of SEQ ID NO: 23; or (13′) a nucleotide sequence having a sequence identity of 95% or more to the nucleotide sequence of SEQ ID NO: 23.

[0087] [3-8] The bacteriolytic agent according to any of [3-1] to [3-7], wherein the bacteriolytic agent exhibits bacteriolytic ability against bacteria of the Xanthomonas genus.

[0088] [3-9] The bacteriolytic agent according to [3-8], wherein the bacteria of the Xanthomonas genus are Xanthomonas arboricola. [3-10] The bacteriolytic agent according to [3-9], wherein the pathovar of the bacteria of the Xanthomonas genus is pruni.

[0089] [4-1] A bacteriolytic agent consisting of a bacteriophage comprising, in the genomic DNA, a gene encoding a tail fiber protein having a recognizing ability for target bacteria, wherein the protein consists of the amino acid sequence of any one selected from the group consisting of SEQ ID NOs: 42, 11, 45, and 15.

[0090] [4-2] The bacteriolytic agent according to [4-1], wherein the gene consists of the nucleotide sequence of any one selected from the group consisting of SEQ ID NOs: 43, 12, 46, and 16.

[0091] [4-3] The bacteriolytic agent according to [4-1], wherein the nucleotide sequence of the genomic DNA consists of the nucleotide sequence of any one selected from the group consisting of SEQ ID NOs: 44, 13, 47, 48, and 17.

[0092] [4-4] A bacteriolytic agent consisting of a bacteriophage comprising, in the genomic DNA, a gene encoding a tail fiber protein having a recognizing ability for target bacteria, wherein the protein consists of the amino acid sequence of SEQ ID NO: 1.

[0093] [4-5] The bacteriolytic agent according to [4-4], wherein the amino acid sequence of SEQ ID NO: 1 is the amino acid sequence of any one of SEQ ID NOs: 2 to 4.

[0094] [4-6] The bacteriolytic agent according to [4-4], wherein the gene consists of the nucleotide sequence of any one of SEQ ID NOs: 5 to 7.

[0095] [4-7] The bacteriolytic agent according to [4-4], wherein the nucleotide sequence of the genomic DNA consists of the nucleotide sequence of any one of SEQ ID NOs: 8 to 10.

[0096] [4-8] A bacteriolytic agent consisting of a bacteriophage having a genomic DNA sequence comprising the nucleotide sequence of any one selected from the group consisting of SEQ ID NOs: 14, 18, 19, and 32 to 36.

[0097] [4-9] A bacteriolytic agent consisting of a bacteriophage comprising, in the genomic DNA, a gene encoding a protein consisting of the amino acid sequence of SEQ ID NO: 21.

[0098] [4-10] The bacteriolytic agent according to [4-9], wherein the gene consists of the nucleotide sequence of SEQ ID NO: 22.

[0099] [4-11] The bacteriolytic agent according to [4-9], wherein the nucleotide sequence of the genomic DNA consists of the nucleotide sequence of SEQ ID NO: 23.

[0100] [4-12] A bacteriolytic agent consisting of a bacteriophage comprising, in the genomic DNA, the following: a gene encoding a tail tubular protein A consisting of the amino acid sequence of SEQ ID NO: 24, 49, or 37 and having a recognizing ability for target bacteria; and a gene encoding a tail tubular protein B consisting of the amino acid sequence of any one selected from the group consisting of SEQ ID NOs: 57, 50, 38, 54, and 59 and having a recognizing ability for target bacteria.

[0101] [4-13] The bacteriolytic agent according to [4-12], wherein the gene encoding the tail tubular protein A consists of the nucleotide sequence of SEQ ID NO: 26, 51, or 39.

[0102] [4-14] The bacteriolytic agent according to [4-12], wherein the gene encoding the tail tubular protein B consists of the nucleotide sequence of any one selected from the group consisting of SEQ ID NOs: 27, 52, 40, and 55.

[0103] [4-15] The bacteriolytic agent according to [4-12], wherein the nucleotide sequence of the genomic DNA consists of the nucleotide sequence of any one selected from the group consisting of SEQ ID NOs: 28, 29, 53, and 41.

[0104] [4-16] The bacteriolytic agent according to any of [4-1] to [4-15], wherein the bacteriolytic agent exhibits bacteriolytic ability against bacteria of the Xanthomonas genus.

[0105] <1> A composition comprising one or more of the bacteriolytic agents according to any of (1-1) to (10-5), [1-1] to [4-16] as an active component(s).

[0106] <2> A composition comprising two or more of the bacteriolytic agents according to (1-1) to (10-5), [1-1] to [4-16] as active components.

[0107] <3> A composition for plant disease control, comprising the composition according to <1> or <2>.

[0108] <4> The composition for plant disease control according to <3>, wherein the plant disease is caused by bacteria of the Xanthomonas genus.

[0109] <5> The composition for plant disease control according to <3> or <4>, comprising another bacteriophage having bacteriolytic ability against the bacteria of the Xanthomonas genus.

[0110] <6> A method for controlling plant disease, comprising a contacting step of contacting the composition for plant disease control according to any of <3> to <5> to a target plant.

[0111] <7> A method for identifying bacteria of the Xanthomonas genus, comprising: a culturing step of culturing subject bacteria isolated from a plant tissue affected by a plant disease, to obtain a culture preparation; a mixing step of mixing the culture preparation and the bacteriolytic agent according to any of (1-1) to (10-5), [1-1] to [4-16], to obtain a mixture; a mixture culturing step of culturing the mixture under predetermined conditions; and a determining step of determining that the subject bacteria is a bacteria of the Xanthomonas genus, when the subject bacteria are lysed after the mixture culturing step.

[0112] <8> The method according to <7>, wherein, in the mixture culturing step, the mixture further comprises a soft agar containing liquid medium, and wherein the mixture is cultured on a solid medium.

[0113] <9> The method according to <7>, wherein, in the culturing step, the culture preparation comprises a soft agar containing liquid medium, and wherein the culture preparation is cultured on a solid medium.

[0114] <10> The method according to any of <7> to <9>, further comprising, before the culturing step, an isolating step of isolating subject bacteria from a plant tissue affected by a plant disease.

[0115] The present specification encompasses the disclosure of Japanese Patent Application Nos. 2022-059936, 2022-060143, 2022-060249, 2022-060441, 2022-060819, 2022-060822, 2022-060887, 2022-060909, 2022-061075, 2022-156882, 2022-156972, 2022-157086, 2023-041699, 2023-041776, 2023-041784, and 2023-041827 that serve as a basis for the priority of the present application.

[0116] A bacteriolytic agent of one or more embodiments of the present invention and a composition comprising the same as an active component can lyse specific target bacteria.

[0117] A composition for plant disease control according to one or more embodiments of the present invention can prevent and inhibit a disease caused by specific target bacteria.

### BRIEF DESCRIPTION OF THE DRAWINGS

[0118] FIGS. 1A-1B show the bacteriolytic ability of the 1st bacteriophage obtained in Example 1. FIG. 1A shows a static culture with agar plates on which the bacteria of the Xanthomonas genus and Pseudomonas fluorescens as a control, which are shown in Table 2, were spread and cultured, and onto which a refined solution of the 1st phage was then dropped. FIG. 1B is a diagram of the plates corresponding to FIG. 1A, and shows the positions of the refined solutions of phage dropped onto the respective plates. In FIGS. 1A and 1B, 1 indicates a plate on which the bacteria with the ID MAFF No. 211191 was spread, 2 indicates a plate on which the bacteria with the ID MAFF No. 311351 was spread, 3 indicates a plate on which the bacteria with the ID MAFF No. 301256 was spread, 4 indicates a plate on which the bacteria with the ID MAFF No. 106765 was spread, 5 indicates a plate on which the bacteria with the ID MAFF No. 301078 was spread, and 6 indicates a plate on which Pseudomonas fluorescens with the ID NCIMB-ID 10460 as a control was spread. In FIG. 1B, a indicates the position of a refined solution of a phage having the genomic DNA sequence of SEQ ID NO: 8, b indicates the position of a refined solution of a phage having the genomic DNA sequence of SEQ ID NO: 9, and c indicates the position of a refined solution of a phage having the genomic DNA sequence of SEQ ID NO: 10.

[0119] FIGS. 2A-2B show the bacteriolytic ability of the 2nd bacteriophage obtained in Example 2.

[0120] FIG. 2A shows a static culture with agar plates on which the bacteria of the Xanthomonas genus and Pseudomonas fluorescens as a control were spread and cultured, and onto the central portion of which a refined solution of the 2nd phage was then dropped. FIG. 2B is a diagram of the plates corresponding to FIG. 2A and shows the bacteria listed in Table 4, which were spread on the respective plates.

[0121] FIGS. 3A-3B show the bacteriolytic ability of the 3rd bacteriophage obtained in Example 3. FIG. 3A shows a static culture with agar plates on which the bacteria of the Xanthomonas genus and Pseudomonas fluorescens as a control, which are shown in Table 5, were spread and cultured, and onto which a refined solution of the 3rd phage was then dropped. FIG. 3B is a diagram of the plates corresponding to FIG. 3A and shows the positions of the refined solutions of phage dropped onto the respective plates. In FIGS. 3A and 3B, 1 indicates a plate on which the bacteria with the ID MAFF No. 311282 was spread, 2 indicates a plate on which the bacteria with the ID MAFF No. 301426 was spread, 3 indicates a plate on which the bacteria with the ID MAFF No. 311351 was spread, 4 indicates a plate on which the bacteria with the ID MAFF No. 311586 was spread, 5 indicates a plate on which the bacteria with the ID MAFF No. 311618 was spread, and 6 indicates a plate on which Pseudomonas fluorescens with the ID NCIMB-ID 10460 as a control was spread.

[0122] FIGS. 4A-4B show the bacteriolytic ability of the 4th bacteriophage obtained in Example 4. FIG. 4A shows a static culture with agar plates on which the bacteria of the Xanthomonas genus and Pseudomonas fluorescens as a control were spread and cultured, and onto the central portion of which a refined solution of the 4th phage was then dropped. FIG. 4B is a diagram of the plates corresponding to FIG. 4A and shows the bacteria listed in Table 6, which were spread on the respective plates.

[0123] FIGS. 5A-5B show the bacteriolytic ability of the 5th bacteriophage obtained in Example 5. The upper part (1 to 3) of FIGS. 5A-5B shows the bacteriolytic ability of the bacteriophage of SEQ ID NO: 18, and the lower part (4 to 6) shows the bacteriolytic ability of the bacteriophage of SEQ ID NO: 19. FIG. 5A shows a static culture with agar plates on which the bacteria of the Xanthomonas genus and Pseudomonas fluorescens as a control, which are shown in Table 7, were spread and cultured, and onto which a refined solution of the 5th phage was then dropped. FIG. 5B is a diagram of the plates corresponding to FIG. 5A, and shows the positions of the refined solutions of phage dropped onto the respective plates. In FIGS. 5A and 5B, 1 and 4 each indicate a plate on which the bacteria with the ID MAFF No. 211971 was spread, 2 and 5 each indicate a plate on which the bacteria with the ID MAFF No. 311351 was spread, and 3 and 6 each indicate a plate on which Pseudomonas fluorescens with the ID NCIMB-ID 10460 as a control was spread.

[0124] FIGS. 6A-6B show the bacteriolytic ability of the 6th bacteriophage obtained in Example 6. FIG. 6A shows a static culture with agar plates on which the bacteria of the Xanthomonas genus and Pseudomonas fluorescens as a control were spread and cultured, and onto the central portion of which a refined solution of the 6th phage was then dropped. FIG. 6B is a diagram of the plates corresponding to FIG. 6A and shows the bacteria listed in Table 9, which were spread on the respective plates.

[0125] FIGS. 7A-7B show the bacteriolytic ability of the 7th bacteriophage obtained in Example 7. FIG. 7A shows a static culture with agar plates on which the bacteria of the Xanthomonas genus and Pseudomonas fluorescens as a control, which are shown in Table 10, were spread and cultured, and onto which a refined solution of the 7th phage was then dropped. FIG. 7B is a diagram of the plates corresponding to FIG. 7A and shows the positions of the refined solutions of phage dropped onto the respective plates. In FIGS. 7A and 7B, 1 indicates a plate on which the bacteria with the ID MAFF No. 311351 was spread, 2 indicates a plate on which the bacteria with the ID MAFF No. 311622 was spread, 3 indicates a plate on which the bacteria with the ID MAFF No. 106642 was spread, and 4 indicates a plate on which Pseudomonas fluorescens with the ID NCIMB-ID 10460 as a control was spread. In FIG. 7B, a indicates the position of a refined solution of a phage having the genomic DNA sequence of SEQ ID NO: 28, and b indicates the position of a refined solution of a phage having the genomic DNA sequence of SEQ ID NO: 29.

[0126] FIGS. 8A-8B show the bacteriolytic ability of the 8th bacteriophage obtained in Example 8. FIG. 8A shows a static culture with agar plates on which the bacteria of the Xanthomonas genus and Pseudomonas fluorescens as a control, which are shown in Table 11, were spread and cultured, and onto which a refined solution of the 8th phage was then dropped. FIG. 8B is a diagram of the plates corresponding to FIG. 8A and shows the positions of the refined solutions of phage dropped onto the respective plates. In FIGS. 8A and 8B, 1 indicates a plate on which the bacteria with the ID MAFF No. 211971 was spread, 2 indicates a plate on which the bacteria with the ID MAFF No. 311282 was spread, 3 indicates a plate on which the bacteria with the ID MAFF No. 301420 was spread, 4 indicates a plate on which the bacteria with the ID MAFF No. 301426 was spread, 5 indicates a plate on which the bacteria with the ID MAFF No. 311351 was spread, 6 indicates a plate on which the bacteria with the ID MAFF No. 311414 was spread, 7 indicates a plate on which the bacteria with the ID MAFF No. 311417 was spread, 8 indicates a plate on which the bacteria with the ID MAFF No. 311562 was spread, 9 indicates a plate on which the bacteria with the ID MAFF No. 311571 was spread, 10 indicates a plate on which the bacteria with the ID MAFF No. 311618 was spread, 11 indicates a plate on which the bacteria with the ID MAFF No. 311622 was spread, and 12 indicates a plate on which Pseudomonas fluorescens with the ID NCIMB-ID 10460 as a control was spread. In FIG. 8B, a indicates the position of a refined solution of a phage having the genomic DNA sequence of SEQ ID NO: 32.

[0127] FIGS. 9A-9B show the bacteriolytic ability of the 8th bacteriophage obtained in Example 8. FIG. 9A shows a static culture with agar plates on which the bacteria of the Xanthomonas genus and Pseudomonas fluorescens as a control, which are shown in Table 11, were spread and cultured, and onto which the refined solution of the 8th phage was then dropped. FIG. 9B is a diagram of the plates corresponding to FIG. 9A and shows the positions of the refined solutions of phage dropped onto the respective plates. In FIGS. 9A and 9B, 1 indicates a plate on which the bacteria with the ID MAFF No. 211971 was spread, 2 indicates a plate on which the bacteria with the ID MAFF No. 311282 was spread, 3 indicates a plate on which the bacteria with the ID MAFF No. 301420 was spread, 4 indicates a plate on which the bacteria with the ID MAFF No. 301426 was spread, 5 indicates a plate on which the bacteria with the ID MAFF No. 311351 was spread, and 6 indicates a plate on which Pseudomonas fluorescens with the ID NCIMB-ID 10460 as a control was spread. In FIG. 9B, b indicates the position of a refined solution of a phage having the genomic DNA sequence of SEQ ID NO: 33, c indicates the position of a refined solution of a phage having the genomic DNA sequence of SEQ ID NO: 34, d indicates the position of a refined solution of a phage having the genomic DNA sequence of SEQ ID NO: 35, and e indicates the position of a refined solution of a phage having the genomic DNA sequence of SEQ ID NO: 36.

[0128] FIGS. 10A-10B show the bacteriolytic ability of a bacteriophage obtained in Example 9. FIG. 10A shows a static culture with agar plates on which the bacteria of the Xanthomonas genus and Pseudomonas fluorescens as a control, which are shown in Table 13, were spread and cultured, and onto which a refined solution of phage was then dropped. FIG. 10B is a diagram of the plates corresponding to FIG. 10A and shows the positions of the refined solutions of phage dropped onto the respective plates.

[0129] FIGS. 11A-11B show the bacteriolytic ability of a bacteriophage obtained in Example 10. FIG. 11A shows a static culture with agar plates on which the bacteria of the Xanthomonas genus and Pseudomonas fluorescens as a control, which are shown in Table 13, were spread and cultured, and onto which a refined solution of phage was then dropped. FIG. 11B is a diagram of the plates corresponding to FIG. 11A and shows the positions of the refined solutions of phage dropped onto the respective plates.

[0130] FIG. 12 shows one example of a plate in a plaque assay of the 1st bacteriophage obtained in Example 1.

[0131] FIG. 13 shows one example of a plate in a plaque assay of the 2nd bacteriophage obtained in Example 2.

[0132] FIGS. 14A-14B show the bacteriolytic ability of the 2nd bacteriophage obtained in Example 11. FIG. 14A shows a static culture with agar plates on which the bacteria of the Xanthomonas genus and Pseudomonas fluorescens as a control, which are shown in Table 4, were spread and cultured, and onto which the refined solution of 2nd phage was then dropped. FIG. 14B is a diagram of the plates corresponding to FIG. 14A and shows the positions of the refined solutions of phage dropped onto the respective plates. In FIGS. 14A and 14B, 1 indicates a plate on which the bacteria with the ID MAFF No. 673005 was spread, 2 indicates a plate on which the bacteria with the ID MAFF No. 301256 was spread, 3 indicates a plate on which the bacteria with the ID MAFF No. 301352 was spread, 4 indicates a plate on which the bacteria with the ID MAFF No. 212146 was spread, 5 indicates a plate on which the bacteria with the ID MAFF No. 311351 was spread, and 6 indicates a plate on which Pseudomonas fluorescens with the ID NCIMB-ID 10460 as a control was spread. In FIG. 14B, a indicates the position of a refined solution of a phage having the genomic DNA sequence of SEQ ID NO: 47, and b indicates the position of a refined solution of a phage having the genomic DNA sequence of SEQ ID NO: 48.

[0133] FIGS. 15A-15B show the bacteriolytic ability of the 7th phage obtained in Example 2 and two kinds of 2nd bacteriophages obtained in Example 11. FIG. 15A shows a static culture with an agar plate on which the bacteria of the Xanthomonas genus, which are shown in Table 14, were spread and cultured, and onto which the refined solution of 2nd phage was then dropped. FIG. 15B is a diagram of the plates corresponding to FIG. 15A and shows the positions of the refined solutions of phage dropped onto the respective plates. In FIG. 15B, a indicates the position of a refined solution of a phage having the genomic DNA sequence of SEQ ID NO: 12, b indicates the position of a refined solution of a phage having the genomic DNA sequence of SEQ ID NO: 47, and c indicates the position of a refined solution of a phage having the genomic DNA sequence of SEQ ID NO: 48.

[0134] FIGS. 16A-16B show the bacteriolytic ability of the 7th bacteriophage obtained in Example 12. FIG. 16A shows a static culture with agar plates on which the bacteria of the Xanthomonas genus and Pseudomonas fluorescens as a control, which are shown in Table 10, were spread and cultured, and onto which a refined solution of phage was then dropped. FIG. 16B is a diagram of the plates corresponding to FIG. 16A and shows the IDs of the bacteria cultured on the respective plates.

[0135] FIGS. 17A-17B show the bacteriolytic ability of two kinds of 7th phages obtained in Example 7 and a phage obtained in Example 12. FIG. 17A shows a static culture with an agar plate on which the bacteria of the Xanthomonas genus with the ID MAFF No. 301260 were spread and cultured, and onto which a refined solution of phage was then dropped. FIG. 17B is a diagram of the plates corresponding to FIG. 17A and shows the positions of the refined solutions of phage dropped onto the respective plates. In FIG. 17B, a indicates the position of a refined solution of a phage having the genomic DNA sequence of SEQ ID NO: 28, b indicates the position of a refined solution of a phage having the genomic DNA sequence of SEQ ID NO: 29, and c indicates the position of a refined solution of a phage obtained in Example 12 and having the genomic DNA sequence of SEQ ID NO: 53.

[0136] FIGS. 18A-18B show the bacteriolytic ability of a 9th bacteriophage obtained in Example 13. FIG. 18A shows a static culture with an agar plate on which the bacteria of the Xanthomonas genus, which are shown in Table 13, were spread and onto which a refined solution of phage was then dropped. FIG. 18B is a diagram of the plates corresponding to FIG. 18A and shows the IDs of the bacteria cultured on the respective plates.

[0137] FIGS. 19A-19B show the bacteriolytic ability of the combinations of bacteriophages tested in Example 14. FIG. 19A shows a static culture on an agar plate on which the bacteria of the Xanthomonas genus with the ID MAFF No. 311351 were spread and cultured, and onto which a refined solution of phage was then dropped. FIG. 19B is a diagram of the plates corresponding to FIG. 19A and shows the kinds of phages comprised in the refined solutions of phages dropped onto the respective plates. In FIG. 19B, a indicates the 1st phage having the genomic DNA sequence of SEQ ID NO: 8, b indicates the 2nd phage having the genomic DNA sequence of SEQ ID NO: 13, c indicates the 7th phage having the genomic DNA sequence of SEQ ID NO: 28, d indicates the 9th phage having the genomic DNA sequence of SEQ ID NO: 41, e indicates the 10th phage having the genomic DNA sequence of SEQ ID NO: 44, f indicates the 3rd phage having the genomic DNA sequence of SEQ ID NO: 14, g indicates the 4th phage having the genomic DNA sequence of SEQ ID NO: 17, h indicates the 5th phage having the genomic DNA sequence of SEQ ID NO: 18, i indicates the 6th phage having the genomic DNA sequence of SEQ ID NO: 23, and j indicates the 8th phage having the genomic DNA sequence of SEQ ID NO: 32, respectively. In the diagram, the mark “/” indicates that the phages before and after the mark are used in combination. For example, “a/b” indicates that the 1st phage and the 2nd phage are used in combination.

[0138] FIGS. 20A-20B show the bacteriolytic ability of the combinations of bacteriophages tested in Example 14. FIG. 20A shows a static culture on an agar plate on which the bacteria of the Xanthomonas genus with the ID MAFF No. 311351 were spread and cultured, and onto which a refined solution of phage was then dropped. FIG. 20B is a diagram of the plates corresponding to FIG. 20A and shows the kinds of phages comprised in the refined solutions of phages dropped onto the respective plates. In FIG. 20B, a indicates the 1st phage having the genomic DNA sequence of SEQ ID NO: 8, b indicates the 2nd phage having the genomic DNA sequence of SEQ ID NO: 13, c indicates the 7th phage having the genomic DNA sequence of SEQ ID NO: 28, d indicates the 9th phage having the genomic DNA sequence of SEQ ID NO: 41, e indicates the 10th phage having the genomic DNA sequence of SEQ ID NO: 44, f indicates the 3rd phage having the genomic DNA sequence of SEQ ID NO: 14, g indicates the 4th phage having the genomic DNA sequence of SEQ ID NO: 17, h indicates the 5th phage having the genomic DNA sequence of SEQ ID NO: 18, i indicates the 6th phage having the genomic DNA sequence of SEQ ID NO: 23, and j indicates the 8th phage having the genomic DNA sequence of SEQ ID NO: 32, respectively. In the diagram, the mark “/” indicates that the phages before and after the mark are used in combination. For example, “f/g” indicates that the 3rd phage and the 4th phage are used in combination.

[0139] FIG. 21 graphs the result of a disease control effect test on a shot hole disease of Prunus spp. tested in Example 15. The average incidence rate is expressed as a relative value with respect to a nontreated group. The number below each bar indicates the kind of phage used. In each experimental group, each of the 1st to 8th phages was used alone.

[0140] FIG. 22 graphs the result of a disease control effect test on a shot hole disease of Prunus spp. tested in Example 15. The average incidence rate is expressed as a relative value with respect to a nontreated group. The numbers below each bar indicate the kinds of phages used in combination. In each experimental group, a combination of four kinds of phages consisting of the 1st phage, the 3rd phage, the 5th phage, and the 7th phage; a combination of four kinds of phages consisting of the 2nd phage, the 4th phage, the 6th phage, and the 8th phage; and a combination of eight kinds of phages consisting of the 1st phage to the 8th phage were used, respectively.

[0141] FIG. 23 graphs the result of a disease control effect test on a black rot disease of broccoli tested in Example 16. The average incidence rate is expressed as a relative value with respect to a nontreated group. The number below each bar indicates the kind of phage used. In the graph, a circle indicates that the phage was used, and “-” indicates that the phage was not used. Φ1 indicates the 1st phage having the genomic DNA sequence of SEQ ID NO: 10, Φ2-1 indicates the 2nd phage having the genomic DNA sequence of SEQ ID NO: 13, Φ2-2 indicates the 2nd phage having the genomic DNA sequence of SEQ ID NO: 47, Φ7-1 indicates the 7th phage having the genomic DNA sequence of SEQ ID NO: 28, Φ7-2 indicates the 7th phage having the genomic DNA sequence of SEQ ID NO: 53, Φ9 indicates the 9th phage having the genomic DNA sequence of SEQ ID NO: 41, and Φ10 indicates the 10th phage having the genomic DNA sequence of SEQ ID NO: 44, respectively.

[0142] FIG. 24 graphs the result of a disease control effect test on a bacterial spot disease of tomato tested in Example 17. The average incidence rate is expressed as a relative value with respect to a nontreated group. The number below each bar indicates the kind of phage used. In the graph, a circle indicates that the phage was used, and “-” indicates that the phage was not used. Φ1 indicates the 1st phage having the genomic DNA sequence of SEQ ID NO: 10, Φ2-1 indicates the 2nd phage having the genomic DNA sequence of SEQ ID NO: 13, Φ2-2 indicates the 2nd phage having the genomic DNA sequence of SEQ ID NO: 47, Φ2-3 indicates the 2nd phage having the genomic DNA sequence of SEQ ID NO: 48, Φ7 indicates the 7th phage having the genomic DNA sequence of SEQ ID NO: 28, and Φ10 indicates the 10th phage having the genomic DNA sequence of SEQ ID NO: 44, respectively.

### DETAILED DESCRIPTION

### 1. Bacteriolytic Agent

### 1-1. Overview

[0143] A first aspect of one or more embodiments of the present invention is a bacteriolytic agent. A bacteriolytic agent of one or more embodiments of the present invention consists of a bacteriophage having a genomic sequence comprising a specific nucleotide sequence.

[0144] A bacteriolytic agent of one or more embodiments of the present invention exhibits bacteriolytic ability against target bacteria that can be pathogenic bacteria for a plant disease.

### 1-2. Definition

[0145] Terms used herein are defined below.

[0146] A “bacteriolytic agent” as used herein refers to a drug consisting of a bacteriophage having bacteriolytic ability against target bacteria.

[0147] “Bacteria”, besides archaea and eukaryotes, is one of the three major biological lineages into which the whole biological world is classified. A bacterium is composed of a cell without a nucleus (acaryote) and can self-reproduce itself with a nutrient source. Bacteria are named with a genus and a species under a family in accordance with the International Code of Nomenclature of Bacteria.

[0148] “Target bacteria” as used herein refers to host bacteria that may be a target for a phage constituting a bacteriolytic agent of the present disclosure or a phage comprised in a composition for plant disease control and a composition according to the present disclosure. A specific example is a bacterium having a membrane surface receptor to be recognized on the outer membrane (epicyte) by the phage. Another example is a bacterium that has on the outer membrane a membrane surface receptor to be recognized by a tail fiber protein consisting of a specific amino acid sequence. Yet another example is a bacterium that has on the outer membrane a membrane surface receptor to be recognized by a tail tubular protein consisting of a specific amino acid sequence. A “membrane surface receptor” is a site to which, for example, a tail, a tail fiber, and the like of a phage are bound, and is composed of a protein, a lipopolysaccharide, pili, or the like that is present in the outer layer of the bacterial outer membrane. A specific example of the target bacteria herein is bacteria of the Xanthomonas genus.

[0149] “Bacteria of the Xanthomonas genus” refers to a bacteria belonging to Xanthomonas genus. Bacteria of the Xanthomonas genus commonly produce a yellow pigment called Xanthomonasin, and many of the bacteria are known to be plant pathogenic bacteria. In this connection, there are subtypes and pathovars as subclasses of species, and they are indicated by subsp. or pv. following the name of the bacteria, respectively. Additionally, the smallest unit of classification is a strain, which refers to a cell population considered to be genetically uniform. Table 1 below shows typical bacteria of the Xanthomonas genus, host plants thereof, and plant diseases caused thereby.

TABLE 1

| Species | Pathovar | Host | Disease |
|---|---|---|---|
| X. arboricola | pruni | Peach | Bacterial spot |
| X. arboricola | juglandis | Walnut | Bacterial blight |
| X. arboricola | corylina | Turkish Hazel | Leaf spot |
| X. axonopodis | citrumelo | Citrus | Bacterial spot |
| X. axonopodis | glycines | Soybean | Bacterial pustule |
| X. axonopodis | manihotis | Cassava | Bacterial blight |
| X. axonopodis | malvacearum | Cotton | Bacterial blight |
| X. axonopodis | punicae | Pomegranate | Leaf blight |
| X. albilineans | | Sugarcane | Leaf scald |
| X. campestris | campestris | Cabbage | Black rot |
| X. campestris | musacearum | Banana | Bacterial wilt |
| X. campestris | vasculorum | Sugarcane | Gumming disease |
| X. campestris | vesicatoria | Tomato/Pepper | Bacterial spot |
| X. campestris | vitians | Lettuce | Bacterial spot |
| X. campestris | raphani | Cabbage | Leaf spot |
| X. citri | citri | Orange | Bacterial canker |
| X. citri | malvacearum | Cotton | Angular leaf spot |
| X. citri | mangiferaeindicae | Mango | Black spot |
| X. cucurbitae | | Pumpkin | Bacterial Spot |
| X. fragariae | | Strawberry | Angular leaf spot |
| X. fuscans | fuscans | Bean | Bacterial blight |
| X. hortorum | carotae | Carrot | Bacterial blight |
| X. oryzae | oryzae | Rice | Leaf blight |

[0150] Among the bacteria of the Xanthomonas genus, Xanthomonas arboricola, Xanthomonas campestris, Xanthomonas citri, Xanthomonas oryzae, and Xanthomonas cucurbitae are preferable as target bacteria in one or more embodiments of the present invention, without limitation. Specific examples of Xanthomonas arboricola include: Xanthomonas arboricola pv. pruni, the pathovar of which is pruni; and Xanthomonas arboricola pv. juglandis, the pathovar of which is juglandis. Specific examples of Xanthomonas campestris include: Xanthomonas campestris pv. vesicatoria, the pathovar of which is vesicatoria; Xanthomonas campestris pv. campestris, the pathovar of which is campestris; Xanthomonas campestris pv. vitians, the pathovar of which is vitians; and Xanthomonas campestris pv. raphani, the pathovar of which is raphani. Specific examples of Xanthomonas citri include Xanthomonas citri subsp. citri. Specific examples of Xanthomonas oryzae include Xanthomonas oryzae pv. oryzae, the pathovar of which is oryzae.

[0151] A “bacteriophage” (herein often abbreviated simply as a “phage,” as mentioned above) is a generic term for viruses that infect bacteria. A common phage is composed of three parts: a head (head part), a tail (tail part), and a tail fiber (tail fiber part). The head, constituted by a capsomere that is a coat protein, is composed of a capsid (viral shell) having an icosahedral structure, in the inner space of which the genomic DNA of a phage is encapsulated. The tail has a tubular structure composed of a tail tubular protein and a sheath protein covering the same. One end and the other of the tail are linked to the head and the tail fiber, respectively. The tail functions as an introduction tube through which the genomic DNA in the head is injected into the cell of the host bacteria. The tail fiber has a structure of several fibers composed of a tail fiber protein. The tail and the tail fiber serve a host-recognizing function and an attachment function, i.e., to recognize a receptor on the surface of the outer membrane of host bacteria and be attached to the cell surface. A phage has an extremely high host specificity, and this characteristic is based on the functions of the tail and the tail fiber.

[0152] A phage does not infect a eukaryote, and thus, a drug comprising a phage is harmless to humans, animals, and plants. In this connection, phages are roughly classified into a “bacteriolytic cycle”, a “lysogenic cycle”, and a “bacteriolytic/lysogenic cycle” according to the mode of infection. In the lysogenic cycle, a phage incorporates (introduces) its own DNA into a chromosome of target bacteria without lysing the bacteria and proliferates as the bacteria proliferate. On the other hand, in the bacteriolytic cycle, a phage self-proliferates in a cell of host bacteria and then lyses the host bacteria to release a large number of daughter phages. As a phage in one or more embodiments of the present invention, a virulent phage that undergoes the bacteriolytic cycle is intended.

[0153] A “tail fiber protein” is a protein constituting the tail fiber of a phage, as described above. It is known that the tail fiber protein plays an important role in the specificity of the host recognition and attachment capability of the tail and the tail fiber (Nobrega F. L. et al., Nat. Rev. Microbiol., 2018, 16:760-773). Accordingly, even if the host bacteria for the novel phage characterized by the tail fiber protein are the same as for a known phage, the novel phage is different in the recognition site of the host and hence provides a very high utility value, for example, a possibility of exhibiting bacteriolytic ability even to bacteria having, for example, infection resistance to a known phage.

[0154] A “tail fiber gene” refers to a gene encoding the tail fiber protein comprised in the genomic DNA of a phage.

[0155] A “tail tubular protein” is a protein constituting the tubular structure of the tail of a phage, as described above. It is known that the tail tubular protein interacts with the tail fiber and, together with the tail fiber, plays an important role in the specificity of the host recognition and attachment capability (Maozhi Hu, et ai., 2020, 9:1, 855-867). As tail tubular proteins, a tail tubular fiber protein A and a tail tubular protein B are known. The “tail tubular protein A” is a protein that forms a ring at the lower part of the tubular structure of the tail and interacts with the tail fiber. The “tail tubular protein B” is a protein that forms the end of the lower part of the tubular structure of the tail and is bound to a receptor on the surface of the outer membrane of host bacteria.

[0156] A “tail tubular gene” refers to a gene encoding the tail tubular protein comprised in the genomic DNA of a phage. The “tail tubular protein A gene” and the “tail tubular protein B gene” refer to a gene encoding the tail tubular protein A and a gene encoding the tail tubular protein B, respectively.

[0157] “Bacteriolysis” refers to a phenomenon that destroys the cell membrane of bacteria. As described above, the phenomenon is mainly observed in the mode of infection of a virulent phage. Bacteriolysis kills bacteria. Bacteriolysis starts when a phage is specifically attached to a target bacterium and injects its own DNA into a cell of the target bacterium via the tail. Then, the phage utilizes the translational mechanism of the bacteria for self-reproduction to produce a large number of daughter phages and then lyses the bacteria to release the daughter phages to the outer space.

[0158] A “plant disease” as used herein is a generic term for diseases caused in a plant. A known plant disease includes a disease caused by an infectious pathogen such as a virus, bacteria, filamentous fungus, actinomycete, viroid, Phytoplasma, nematode, mite, or insect, or a disease caused by a noninfectious pathogen such as the lack or excess of a nutrient or water, drug poisoning, or the like. A plant disease herein refers to a disease whose pathogens are bacteria, i.e., a plant pathogenic bacterium, unless otherwise specified. A plant pathogenic bacterium herein corresponds to the above-described target bacteria, for example, bacteria of the Xanthomonas genus, unless otherwise specified.

[0159] “Control” as used herein refers to prevention or treatment (extermination) (from the home page of the Japan Crop Protection Association). Accordingly, “plant disease control” as used herein refers to the prevention of a plant disease, particularly against a target bacterium, or to the treatment of a plant disease caused by a target bacterium.

[0160] A “target plant” as used herein refers to a plant to which the below-described composition for plant disease control according to one or more embodiments of the present invention is to be applied. This plant is a plant that has a specific plant disease caused by the infection of the target bacteria, or a plant that has the possibility of being infected by the target bacteria.

### 1-3. Constitution

[0161] A bacteriolytic agent of one or more embodiments of the present invention consists of a bacteriophage.

### <1 st Phage>

[0162] The 1st phage is characterized by comprising, in the genomic DNA, a gene encoding a tail fiber protein consisting of a specific amino acid sequence and exhibits bacteriolytic ability specifically to target bacteria.

### (1-1) Tail Fiber Protein

[0163] The tail fiber protein consists of: the amino acid sequence of SEQ ID NO: 1 composed of 1371 amino acid residues, the amino acid sequence having addition, deletion, and/or substitution of one or a plurality of amino acids in the amino acid sequence of SEQ ID NO: 1, or an amino acid sequence having an amino acid sequence identity of 90% or more, 95% or more, 96% or more, 97% or more, 98% or more, or 99% or more to the amino acid sequence of SEQ ID NO: 1. Each of the tail fiber proteins is characterized by having target-bacteria-specific recognizing ability.

[0164] In this regard, “a plurality” as used herein refers to 2 to 10, for example, 2 to 7, 2 to 5, 2 to 4, or 2 to 3. Additionally, a “substitution (of an amino acid)” refers to a substitution within a group of conservative amino acids, in which the amino acids are similar in properties such as the electric charge, side chain, polarity, and aromaticity among the 20 kinds of amino acids constituting natural proteins. The substitution is, for example, within the uncharged polarity amino acid group having a low-polarity side chain (Gly, Asn, Gln, Ser, Thr, Cys, and Tyr), the branched-chain amino acid group (Leu, Val, and Ile), the neutral amino acid group (Gly, Ile, Val, Leu, Ala, Met, and Pro), the neutral amino acid group having a hydrophilic side chain (Asn, Gln, Thr, Ser, Tyr, and Cys), the acidic amino acid group (Asp and Glu), the basic amino acid group (Arg, Lys, and His), and the aromatic amino acid group (Phe, Tyr, and Trp). An amino acid substitution in such a group is known to be less likely to change the properties of a polypeptide, and thus, is preferable.

[0165] Furthermore, an “amino acid sequence identity” as used herein is a value that indicates the ratio of the sites at which the kinds of amino acid residues are the same in a range to be compared between two amino acid sequences. Even when the two amino acid sequences are different in length, the amino acid sequence identity can be calculated by aligning the amino acids so that the degree of coincidence of the amino acids in a range to be compared becomes the highest. Without limitation, a typical algorithm for such an analysis is BLAST. BLAST may be utilized with various software or web services. An amino acid sequence identity may be calculated easily, utilizing, for example, genetic information processing software GENETYX (https://www.genetyx.co.jp/) or the NCBI-provided BLAST server (https://blast.ncbi.nlm.nih.gov/Blast.cgi). Besides BLAST, an algorithm called FASTA, or the like, may be utilized, as long as it is capable of calculating an appropriate identity.

[0166] The present inventors have discovered three kinds of phages having bacteriolytic ability against bacteria of the Xanthomonas genus, and identified a tail fiber gene from each of the genomic DNA sequences (SEQ ID NOs: 8 to 10, respectively) of these phages. The amino acid sequences (SEQ ID NOs: 2 to 4) encoded by these tail fiber genes were analyzed using the genetic information processing software GENETYX and were consequently found to have a high sequence identity of 98% or more to each other. SEQ ID NO: 1 is an amino acid sequence common among the above-described amino acid sequences of SEQ ID NOs: 2 to 4.

[0167] Accordingly, the amino acid sequence of SEQ ID NO: 1 may be the amino acid sequence of any of SEQ ID NOs: 2 to 4.

### (1-2) Tail Fiber Gene

[0168] The 1st bacteriophage comprises, in the genomic DNA of the phage, a tail fiber gene consisting of a nucleotide sequence encoding the tail fiber protein.

[0169] Specific examples of the nucleotide sequence of a tail fiber gene include: the nucleotide sequence of any of SEQ ID NOs: 5 to 7; the nucleotide sequence having addition, deletion, and/or substitution of one or a plurality of nucleotides in the nucleotide sequence of any of SEQ ID NOs: 5 to 7; furthermore, a nucleotide sequence having a sequence identity of 90% or more, 95% or more, 96% or more, 97% or more, 98% or more, or 99% or more to the nucleotide sequence of any of SEQ ID NOs: 5 to 7; and a nucleotide sequence that hybridizes with the nucleotide sequence complementary to the nucleotide sequence of any of SEQ ID NOs: 5 to 7 under highly stringent conditions.

[0170] As with the above-described amino acid sequence identity, a “nucleotide sequence identity” as used herein is a value that indicates the ratio of the sites at which the kinds of nucleotides are the same in a range to be compared between two nucleotide sequences. Even when the two nucleotide sequences are different in length, the nucleotide sequence identity can be calculated by aligning the nucleotides so that the degree of coincidence of the nucleotides in a range to be compared becomes the highest. Without limitation, a nucleotide sequence identity may be analyzed using an analysis algorithm such as MUMmer, besides the above-described BLAST and FASTA.

[0171] The “highly stringent conditions” as used herein refer to environmental conditions that are hardly prone to nonspecific hybridization. Under highly stringent conditions, a hybrid can be formed with a nucleic acid having a target nucleotide sequence, but a hybrid cannot substantially be formed with a nucleic acid having a nonspecific nucleotide sequence. Generally, highly stringent conditions refer to low-salt-concentration and high-temperature conditions. The low-salt concentration may be, for example, 15 to 750 mM, 15 to 500 mM, 15 to 300 mM, or 15 to 200 mM. Additionally, the high temperature is, for example, 50 to 68° C. or 55 to 70° C. Specific examples of highly stringent conditions include conditions where hybridization is followed by washing with 0.1×SSC and 0.1% SDS at 65° C.

[0172] Each of the proteins encoded by the tail fiber genes has bacteriolytic ability against target bacteria.

### (1-3) Genomic DNA

[0173] The 1st bacteriophage comprises the tail fiber gene. A gene and a nucleotide sequence other than the tail fiber gene are not limited. The phage genomic DNA is, for example, a genomic DNA consisting of: the nucleotide sequence of any of SEQ ID NOs: 8 to 10 (201015 bp, 200185 bp, and 200277 bp respectively); the nucleotide sequence having addition, deletion, and/or substitution of one or a plurality of nucleotides in the nucleotide sequence of the region other than the tail fiber gene within the nucleotide sequence of any of SEQ ID NOs: 8 to 10; furthermore, a nucleotide sequence having a sequence identity of 80% or more, 81% or more, 82% or more, 83% or more, 84% or more, 85% or more, 86% or more, 87% or more, 88% or more, 89% or more, 90% or more, 91% or more, 92% or more, 93% or more, 94% or more, 95% or more, 96% or more, 97% or more, 98% or more, or 99% or more to the nucleotide sequence of the region other than the tail fiber gene within the nucleotide sequence of any of SEQ ID NOs: 8 to 10; the nucleotide sequence having addition, deletion, and/or substitution of one or a plurality of nucleotides in the nucleotide sequence of any of SEQ ID NOs: 8 to 10; or furthermore, a nucleotide sequence having a sequence identity of 90.0% or more, 90.5% or more, 91.0% or more, 91.5% or more, 92.0% or more, 92.5% or more, 93.0% or more, 93.5% or more, 94.0% or more, 94.5% or more, 95.0% or more, 95.5% or more, 96.0% or more, 96.5% or more, 97.0% or more, 97.5% or more, 98.0% or more, 98.5% or more, 99.0% or more, 99.1% or more, 99.2% or more, 99.3% or more, 99.4% or more, 99.5% or more, 99.6% or more, 99.7% or more, 99.8% or more, or 99.9% or more when aligned with respect to the nucleotide sequence of any of SEQ ID NOs: 8 to 10.

[0174] In this regard, the software and analysis server used herein may indicate a sequence identity according to the index, such as Average Nucleotide Identity (ANI), and these may also be used. In this connection, for a very long phage genomic DNA, it is not easy to set the whole range as the range to be compared by alignment. Accordingly, the above-described sequence identity may be applicable for the range to be aligned automatically provided by the above-mentioned software or Web service. For example, in an analysis using the NCBI-provided BLAST server, the ratio of the range to be compared out of the whole range of phage genomic DNA is calculated as a value called Query Cover after the automatic alignment in the maximum alignable range. When a sequence identity is thus calculated with the partial range being aligned, the result may be used as a basis to estimate the sequence identity of the nucleotide sequence in the whole range of phage genomic DNA (the sequence identity of the whole range). For example, a value obtained by multiplying a Query Cover value by the value of a sequence identity in the range to be compared after alignment (the sequence identity in the range to be aligned) may be used as the estimated value of the sequence identity of the whole range. In this case, to increase the accuracy of the estimated value, a further correction may be added. For example, a sequence identity expected for a range other than the range to be aligned may be reckoned in.

[0175] For example, when a BLAST analysis is made using GENETYX-NGS packaged in GENETYX, the sequence identity (Average Nucleotide Identity: ANI) of SEQ ID NO: 8 to SEQ ID NO: 9 is 98% or more over the range of 96% or more of the full length, and the sequence identity to SEQ ID NO: 10 is 98% or more over the range of 95% or more of the full length. Accordingly, the sequence identity of the genomic DNA sequence of SEQ ID NO: 8 to the full length of the genomic DNA sequence of SEQ ID NO: 9 may be estimated to be 94% or more. Additionally, the sequence identity of the genomic DNA sequence of SEQ ID NO: 8 to the full length of the genomic DNA sequence of SEQ ID NO: 10 may be estimated to be 93% or more.

[0176] In this regard, the genomic DNA of a phage herein is packaged linearly or circularly. Additionally, in a next-generation genome sequencer analysis, the genomic DNA is fragmented, the nucleotide sequence of each of the fragments is read, and an analysis for connecting the sequences is performed to determine a sequence. In the case of a phage, the sequences are often connected without a reference genomic DNA sequence (de novo assembly). Therefore, it is difficult to unambiguously determine the start and end of a genome to be analyzed (Merrill, B. D., et al. BMC Genomics, 2016 17, 679). The starts and ends of genomic sequences in comparison may differ and are automatically taken into consideration in an analysis using software or an analysis server.

### (1-4) Effects

[0177] A bacteriolytic agent of one or more embodiments of the present invention comprising the 1st phage can exhibit bacteriolytic ability against a wide range of various bacterial species of Xanthomonas genus and can be used for various plant diseases.

[0178] Generally, a phage with too high specificity cannot cover the diversity of target bacteria and has a limited effect. Additionally, it is more preferable, from an industrial viewpoint, that a phage can be used for a plurality of plant diseases. Accordingly, a phage that exhibits bacteriolytic ability against a wide range of various bacterial species as a bacteriolytic agent of one or more embodiments of the present invention is extremely useful.

### <2nd Phage>

[0179] The 2nd phage is characterized by comprising, in the genomic DNA, a gene encoding a tail fiber protein consisting of a specific amino acid sequence and exhibits bacteriolytic ability specifically to target bacteria.

### (2-1) Tail Fiber Protein

[0180] The tail fiber protein consists of: the amino acid sequence of SEQ ID NO: 11 composed of 487 amino acid residues, or the amino acid sequence having substitution of one amino acid other than at positions 278 and 350 in the amino acid sequence of SEQ ID NO: 11. The tail fiber protein consisting of the amino acid sequence of SEQ ID NO: 11, or a variant thereof, can allow extremely useful host specificity, i.e., being specific to bacteria in a specific genus and exhibiting bacteriolytic ability against a wide range of various bacterial species in the specific genus.

[0181] As described above, in the case of the amino acid sequence having substitution of one amino acid in the amino acid sequence of SEQ ID NO: 11, the position of substitution is not particularly limited, as long as it is other than positions 278 and 350. For example, one arbitrary amino acid may be substituted in the range from position 1 to position 250 in the amino acid sequence of SEQ ID NO: 11. Specifically, for example, one amino acid may be substituted at position 50 or after, 55 or after, 60 or after, 65 or after, 66 or after, 67 or after, 68 or after, 70 or after, 80 or after, 90 or after, 100 or after, 110 or after, 120 or after, 130 or after, 140 or after, 145 or after, 150 or after, 151 or after, 152 or after, 153 or after, or 154 or after in the amino acid sequence of SEQ ID NO: 11. Additionally, for example, one amino acid may be substituted at position 200 or before, 190 or before, 180 or before, 170 or before, 160 or before, 159 or before, 158 or before, 157 or before, 156 or before, 155 or before, or 154 or before in the amino acid sequence of SEQ ID NO: 11. For example, one amino acid may be substituted at a position between 50 and 200, between 67 and 156, between 80 and 156, between 100 and 156, between 110 and 156, between 120 and 156, between 130 and 156, between 140 and 156, between 150 and 156, between 153 and 156, between 154 and 156, or at position 154. The amino acid region from position 67 to position 156 in the amino acid sequence of SEQ ID NO: 11 conceivably forms one domain. Hence, when one amino acid is substituted and the amino acid is in this amino acid region, the resulting phage can have the characteristics of the 2nd phage, regardless of the position of the amino acid.

[0182] The amino acid substitution is not particularly limited to any type. For example, it may be a conservative substitution or a substitution within the amino acid groups having a low-polarity side chain (Gly, Asn, Gln, Ser, Thr, Cys, Tyr, Leu, Val, Ile, Val, Ala, Met, and Pro). For example, the substitution may be between the uncharged polar amino acid group (Gly, Asn, Gln, Ser, Thr, Cys, or Tyr) or the neutral amino acid group having a hydrophilic side chain (Asn, Gln, Thr, Ser, Tyr, or Cys) and the neutral amino acid group (Gly, Ile, Val, Leu, Ala, Met, or Pro). More specifically, the substitution may be, for example, between threonine (Thr) and alanine (Ala). One example of such a substituted amino acid sequence is the amino acid sequence of SEQ ID NO: 45. This sequence is the amino acid sequence having a substitution of the amino acid at position 154, threonine (Thr), with alanine (Ala) in the amino acid sequence of SEQ ID NO: 11.

### (2-2) Tail Fiber Gene

[0183] The 2nd bacteriophage comprises, in the genomic DNA of the phage, a tail fiber gene consisting of a nucleotide sequence encoding the tail fiber protein.

[0184] A specific nucleotide sequence of the tail fiber gene is not particularly limited, as long as it encodes the amino acid sequence of SEQ ID NO: 11 or the amino acid sequence having substitution of one amino acid other than at positions 278 and 350 in the amino acid sequence of SEQ ID NO: 11. An example is a gene consisting of the nucleotide sequence of SEQ ID NO: 12 encoding the amino acid sequence of SEQ ID NO: 11. Another example is a gene consisting of the nucleotide sequence of SEQ ID NO: 46 encoding the amino acid sequence of SEQ ID NO: 45.

[0185] A protein encoded by the tail fiber gene can allow extremely useful host specificity, i.e., being specific to bacteria in a specific genus and exhibiting bacteriolytic ability against a wide range of various bacterial species in the specific genus.

### (2-3) Genomic DNA

[0186] The 2nd bacteriophage comprises the tail fiber gene. A gene and a nucleotide sequence other than the tail fiber gene are not limited. The phage genomic DNA is, for example, a genomic DNA consisting of: the 63753 bp nucleotide sequence of SEQ ID NO: 13; the 63743 bp nucleotide sequence of SEQ ID NO: 47 or 48; the nucleotide sequence having addition, deletion, and/or substitution of one or a plurality of nucleotides in the nucleotide sequence in the region other than the tail fiber gene within the nucleotide sequence of SEQ ID NO: 13, 47, or 48; furthermore, a nucleotide sequence having a sequence identity of 98.5% or more, 98.6% or more, 98.7% or more, 98.8% or more, or 98.9% or more, 99.0% or more, 99.1% or more, 99.2% or more, 99.3% or more, 99.4% or more, 99.5% or more, 99.6% or more, 99.7% or more, 99.8% or more, or 99.9% or more to the nucleotide sequence in the region other than the tail fiber gene within the nucleotide sequence of SEQ ID NO: 13, 47, or 48; the nucleotide sequence having addition, deletion, and/or substitution of one or a plurality of nucleotides in the nucleotide sequence of SEQ ID NO: 13, 47 or 48; furthermore, a nucleotide sequence having a sequence identity of 99.0% or more, 99.1% or more, 99.2% or more, 99.3% or more, 99.4% or more, 99.5% or more, 99.6% or more, 99.7% or more, 99.8% or more, or 99.9% or more when aligned with respect to the nucleotide sequence of SEQ ID NO: 13, 47 or 48; or a nucleotide sequence that hybridizes, under highly stringent conditions, with the nucleotide sequence of the region other than the tail fiber gene in the nucleotide sequence of SEQ ID NO: 13, 47, or 48.

### (2-4) Effects

[0187] A bacteriolytic agent of one or more embodiments of the present invention comprising the 2nd phage can exhibit bacteriolytic ability against a wide range of various bacterial species of Xanthomonas genus and can be used for various plant diseases.

[0188] Generally, a phage with too high specificity cannot cover the diversity of target bacteria and has a limited effect. Additionally, it is more preferable, from an industrial viewpoint, that a phage may be used for a plurality of plant diseases. Accordingly, a phage that exhibits bacteriolytic ability against a wide range of various bacterial species as a bacteriolytic agent comprising the 2nd phage according to one or more embodiments of the present invention is extremely useful.

### <3rd Phage>

[0189] The 3rd phage is characterized by having a genomic DNA sequence comprising a specific nucleotide sequence and exhibits specific bacteriolytic ability against target bacteria.

### (3-1) Genomic DNA

[0190] The genomic DNA sequence comprises or consists of: the 61291 bp nucleotide sequence of SEQ ID NO: 14; the nucleotide sequence having addition, deletion, and/or substitution of one or a plurality of nucleotides in the nucleotide sequence of SEQ ID NO: 14; or a nucleotide sequence having a sequence identity of 80% or more, 83% or more, 85% or more, 88% or more, 90% or more, 95% or more, 96% or more, 97% or more, 98% or more, or 99% or more to the nucleotide sequence of SEQ ID NO: 14. A bacteriophage comprising any of the genomic DNA sequences is characterized in that the bacteriophage can be specifically attached to target bacteria, and inject the genomic DNA into a cell of the target bacteria.

### (3-2) Effects

[0191] A bacteriolytic agent of one or more embodiments of the present invention comprising the 3rd phage can exhibit bacteriolytic ability against bacteria of the Xanthomonas genus and can be used for a plant disease.

### <4th Phage>

[0192] The 4th phage is characterized by comprising, in the genomic DNA, a gene encoding a tail fiber protein consisting of a specific amino acid sequence and exhibits bacteriolytic ability specifically to target bacteria.

### (4-1) Tail Fiber Protein

[0193] The tail fiber protein consists of the amino acid sequence of SEQ ID NO: 15 composed of 604 amino acid residues, the amino acid sequence having addition, deletion, and/or substitution of one or a plurality of amino acids in the amino acid sequence of SEQ ID NO: 15, or an amino acid sequence having an amino acid sequence identity of 90% or more, 95% or more, 96% or more, 97% or more, 98% or more, or 99% or more to the amino acid sequence of SEQ ID NO: 15. Each of the tail fiber proteins is characterized by having target-bacteria-specific recognizing ability.

### (4-2) Tail Fiber Gene

[0194] The 4th bacteriophage comprises, in the genomic DNA of the phage, a tail fiber gene consisting of a nucleotide sequence encoding the tail fiber protein.

[0195] A specific nucleotide sequence of the tail fiber gene is, for example, the nucleotide sequence of SEQ ID NO: 16 encoding the amino acid sequence of SEQ ID NO: 15; the nucleotide sequence having addition, deletion, and/or substitution of one or a plurality of nucleotides in the nucleotide sequence of SEQ ID NO: 16; furthermore, a nucleotide sequence having a nucleotide sequence identity of 90% or more, 95% or more, 96% or more, 97% or more, 98% or more, or 99% or more to the nucleotide sequence of SEQ ID NO: 16; or a nucleotide sequence that hybridizes with the nucleotide sequence complementary to the nucleotide sequence of SEQ ID NO: 16 under highly stringent conditions.

[0196] Each of the proteins encoded by the tail fiber genes has bacteriolytic ability against target bacteria.

### (4-3) Genomic DNA

[0197] The 4th bacteriophage comprises the tail fiber gene. A gene and a nucleotide sequence other than the tail fiber gene are not limited. For example, the phage genomic DNA is a genomic DNA consisting of: the 46393 bp nucleotide sequence of SEQ ID NO: 17; the nucleotide sequence having addition, deletion, and/or substitution of one or a plurality of nucleotides in the nucleotide sequence of the region other than the tail fiber gene within the nucleotide sequence of SEQ ID NO: 17; furthermore, a nucleotide sequence having a sequence identity of 80% or more, 81% or more, 82% or more, 83% or more, 84% or more, 85% or more, 86% or more, 87% or more, 88% or more, 89% or more, 90% or more, 91% or more, 92% or more, 93% or more, 94% or more, 95% or more, 96% or more, 97% or more, 98% or more, or 99% or more to the nucleotide sequence of the region other than the tail fiber gene within the nucleotide sequence of SEQ ID NO: 17; the nucleotide sequence having addition, deletion, and/or substitution of one or a plurality of nucleotides in the nucleotide sequence of SEQ ID NO: 17; or furthermore, a nucleotide sequence having a sequence identity of 90.0% or more, 90.5% or more, 91.0% or more, 91.5% or more, 92.0% or more, 92.5% or more, 93.0% or more, 93.5% or more, 94.0% or more, 94.5% or more, 95.0% or more, 95.5% or more, 96.0% or more, 96.5% or more, 97.0% or more, 97.5% or more, 98.0% or more, 98.5% or more, 99.0% or more, 99.1% or more, 99.2% or more, 99.3% or more, 99.4% or more, 99.5% or more, 99.6% or more, 99.7% or more, 99.8% or more, or 99.9% or more when aligned with respect to the nucleotide sequence of SEQ ID NO: 17.

### (4-4) Effects

[0198] A bacteriolytic agent of one or more embodiments of the present invention comprising the 4th phage can exhibit bacteriolytic ability against bacteria of the Xanthomonas genus and can be used for a plant disease.

### <5th Phage>

[0199] The 5th phage is characterized by having a genomic DNA sequence comprising a specific nucleotide sequence, and a bacteriolytic agent of one or more embodiments of the present invention exhibits specific bacteriolytic ability against target bacteria.

### (5-1) Genomic DNA

[0200] The genomic DNA sequence of the 5th bacteriophage has: the 43177 bp nucleotide sequence of SEQ ID NO: 18 or the 43741 bp nucleotide sequence of SEQ ID NO: 19; the nucleotide sequence having addition, deletion, and/or substitution of one or a plurality of nucleotides in the nucleotide sequence of SEQ ID NO: 18 or 19; a nucleotide sequence having a sequence identity of 90% or more, 95% or more, 96% or more, 97% or more, 98% or more, or 99% or more to the nucleotide sequence of SEQ ID NO: 18 or 19; a nucleotide sequence having a sequence identity of 95.0% or more, 95.5% or more, 96.0% or more, 96.5% or more, 97.0% or more, 97.5% or more, 98.0% or more, 98.5% or more, 99.0% or more, 99.1% or more, 99.2% or more, 99.3% or more, 99.4% or more, 99.5% or more, 99.6% or more, 99.7% or more, 99.8% or more, or 99.9% or more when aligned with respect to the nucleotide sequence of SEQ ID NO: 18 or 19; or furthermore a nucleotide sequence that hybridizes with the nucleotide sequence complementary to the nucleotide sequence of SEQ ID NO: 18 or 19 under highly stringent conditions.

### (5-2) Effects

[0201] A bacteriolytic agent of one or more embodiments of the present invention comprising the 5th phage can exhibit bacteriolytic ability against bacteria of the Xanthomonas genus and can be used for a plant disease.

### <6th Phage>

[0202] The 6th phage is characterized by comprising, in the genomic DNA, a gene encoding a protein newly discovered in one or more embodiments of the present invention (herein often referred to simply as a “protein of one or more embodiments of the present invention”) and exhibits specific bacteriolytic ability against target bacteria.

(6-1) the Protein of one or more embodiments of the Present Invention

[0203] The protein of one or more embodiments of the present invention consists of the amino acid sequence of SEQ ID NO: 21 composed of 84 amino acid residues, the amino acid sequence having addition, deletion, and/or substitution of one or a plurality of amino acids in the amino acid sequence of SEQ ID NO: 21, or an amino acid sequence having an amino acid sequence identity of 90% or more, 95% or more, 96% or more, 97% or more, 98% or more, or 99% or more to the amino acid sequence of SEQ ID NO: 21. Each of the proteins of one or more embodiments of the present invention is characterized by having target-bacteria-specific recognizing ability.

[0204] A protein of one or more embodiments of the present invention is a novel protein that plays an important role in determining a host range.

(6-2) Gene Encoding the Protein of one or more embodiments of the Present Invention

[0205] The 6th bacteriophage comprises, in the genomic DNA of the phage, a gene encoding the protein of one or more embodiments of the present invention (herein often referred to simply as a “gene of one or more embodiments of the present invention”).

[0206] The gene of one or more embodiments of the present invention is not particularly limited, as long as it encodes the amino acid sequence of SEQ ID NO: 21. A specific example of the nucleotide sequence is, for example, the nucleotide sequence of SEQ ID NO: 22 encoding the amino acid sequence of SEQ ID NO: 21; the nucleotide sequence having addition, deletion, and/or substitution of one or a plurality of nucleotides in the nucleotide sequence of SEQ ID NO: 22; furthermore, a nucleotide sequence having a nucleotide sequence identity of 90% or more, 95% or more, 96% or more, 97% or more, 98% or more, or 99% or more to the nucleotide sequence of SEQ ID NO: 22; or a nucleotide sequence that hybridizes with the nucleotide sequence complementary to the nucleotide sequence of SEQ ID NO: 22 under highly stringent conditions.

[0207] Each of the proteins encoded by the gene of one or more embodiments of the present invention has bacteriolytic ability against target bacteria.

### (6-3) Genomic DNA

[0208] The 6th bacteriophage comprises the gene of one or more embodiments of the present invention. A gene and a nucleotide sequence other than the gene of one or more embodiments of the present invention are not limited. For example, the phage genomic DNA is a genomic DNA consisting of: the 42708 bp nucleotide sequence of SEQ ID NO: 23; the nucleotide sequence having addition, deletion, and/or substitution of one or a plurality of nucleotides in the nucleotide sequence of the region other than the gene of one or more embodiments of the present invention within the nucleotide sequence of SEQ ID NO: 23; furthermore, a nucleotide sequence having a sequence identity of 95% or more, 96% or more, 97% or more, 98% or more, or 99% or more to the nucleotide sequence of the region other than the gene of one or more embodiments of the present invention within the nucleotide sequence of SEQ ID NO: 23; the nucleotide sequence having addition, deletion, and/or substitution of one or a plurality of nucleotides in the nucleotide sequence of SEQ ID NO: 23; or furthermore, a nucleotide sequence having a sequence identity of 95.0% or more, 95.5% or more, 96.0% or more, 96.5% or more, 97.0% or more, 97.5% or more, 98.0% or more, 98.5% or more, 99.0% or more, 99.1% or more, 99.2% or more, 99.3% or more, 99.4% or more, 99.5% or more, 99.6% or more, 99.7% or more, 99.8% or more, or 99.9% or more when aligned with respect to the nucleotide sequence of SEQ ID NO: 23.

### (6-4) Effects

[0209] A bacteriolytic agent of one or more embodiments of the present invention comprising the 6th phage can exhibit bacteriolytic ability against bacteria of the Xanthomonas genus, and can be used for a plant disease.

### <7th Phage>

[0210] The 7th phage is characterized by comprising, in the genomic DNA, a gene encoding a tail tubular protein consisting of a specific amino acid sequence and exhibits bacteriolytic ability specifically to target bacteria.

### (7-1) Tail Tubular Protein

[0211] The tail tubular protein encompasses a tail tubular protein A and a tail tubular protein B. The tail tubular protein A consists of: the amino acid sequence of SEQ ID NO: 24 or 49 composed of 205 amino acid residues, the amino acid sequence having addition, deletion, and/or substitution of one or a plurality of amino acids in the amino acid sequence of SEQ ID NO: 24 or 49, or an amino acid sequence having an amino acid sequence identity of 97% or more, 97.5% or more, 98% or more, 98.5% or more, 99% or more, or 99.5% or more to the amino acid sequence of SEQ ID NO: 24 or 49.

[0212] The amino acid substitution here may comprise an amino acid substitution(s) at one or more positions selected from the group consisting of positions 28, 108, 110, 153, 157, 189, and 201 in the amino acid sequence of SEQ ID NO: 24 or 49. The substitutions include substitutions, for example, at two or more, three or more, four or more, five or more, six or more, or all positions among these positions.

[0213] The amino acid substitution is not particularly limited to any specific type. For example, the substitution may be a conservative substitution, or may comprise one or a plurality of nonconservative substitutions. Specifically, the amino acid sequence of the tail tubular protein A of the 7th phage may be, for example, the amino acid sequence of SEQ ID NO: 60. This amino acid sequence is the same amino acid sequence as SEQ ID NO: 24 or 49, except for the amino acids at the following positions: glutamic acid (Glu) or aspartic acid (Asp) at position 28; serine (Ser) or asparagine (Asn) at position 108; glutamine (Gln) or histidine (His) at position 110; glutamine (Gln) or lysine (Lys) at position 153; aspartic acid (Asp) or asparagine (Asn) at position 157; tyrosine (Tyr) or phenyl alanine (Phe) at position 189; and valine (Val) or tyrosine (Tyr) at position 201.

[0214] The tail tubular protein B consists of the amino acid sequence of SEQ ID NO: 25 (correctly SEQ ID NO: 57) or 50, composed of 834 amino acid residues, the amino acid sequence having addition, deletion, and/or substitution of one or a plurality of amino acids in the amino acid sequence of SEQ ID NO: 25 (correctly SEQ ID NO: 57) or 50, or an amino acid sequence having an amino acid sequence identity of 97% or more, 97.5% or more, 97.6% or more, 98% or more, 98.5% or more, 99% or more, or 99.5% or more to the amino acid sequence of SEQ ID NO: 25 (correctly SEQ ID NO: 57) or 50.

[0215] The amino acid substitution here may comprise an amino acid substitution at one or more positions selected from the group consisting of positions 25, 53, 216, 221, 272, 389, 395, 410, 425, 472, 607, 623, 662, 670, 699, 707, 757, 763, 764, and 765 in the amino acid sequence of SEQ ID NO: 57 or 50. The substitutions may include substitutions, for example, at 2 or more, 3 or more, 4 or more, 5 or more, 10 or more, 15 or more, or all positions among these positions.

[0216] The amino acid substitution is not particularly limited to any specific type. For example, the substitution may be a conservative substitution, or may comprise one or a plurality of nonconservative substitutions. Specifically, the amino acid sequence of the tail tubular protein B of the 7th phage may be, for example, the amino acid sequence of SEQ ID NO: 61. This amino acid sequence is the same amino acid sequence as SEQ ID NO: 57 or 50, except for the amino acids at the following positions: alanine (Ala) or proline (Pro) at position 25; alanine (Ala) or serine (Ser) at position 53; alanine (Ala) or proline (Pro) at position 216; histidine (His) or tyrosine (Tyr) at position 221; valine (Val) or (Ile) at position 272; alanine (Ala) or glutamic acid (Glu) at position 389; serine (Ser) or alanine (Ala) at position 395; valine (Val) or isoleucine (Ile) at position 410; isoleucine (Ile) or valine (Val) at position 425; glycine (Gly) or alanine (Ala) at position 472; alanine (Ala) or serine (Ser) at position 607; isoleucine (Ile) or valine (Val) at position 623; arginine (Arg) or serine (Ser) at position 662; leucine (Leu) or glutamine (Gln) at position 670; threonine (Thr) or asparagine (Asn) at position 699; aspartic acid (Asp) or glycine (Gly) at position 707; serine (Ser) or alanine (Ala) at position 757; glycine (Gly) or serine (Ser) at position 763; serine (Ser) or asparagine (Asn) at position 764; methionine (Met) or valine (Val) at position 765.

[0217] Each of the tail tubular proteins is characterized by having an effect on target-bacteria-specific recognizing ability.

### (7-2) Tail Tubular Gene

[0218] The 7th bacteriophage comprises, in the genomic DNA of the phage, a tail tubular gene consisting of a nucleotide sequence encoding the tail tubular protein.

[0219] The tail tubular gene is not particularly limited, as long as it encodes a tail tubular protein. The tail tubular gene encompasses a tail tubular protein A gene and a tail tubular protein B gene.

[0220] A specific nucleotide sequence of the tail tubular protein A gene is, for example, the nucleotide sequence of SEQ ID NO: 26 or 51 encoding the amino acid sequence of SEQ ID NO: 24 or 49; the nucleotide sequence having addition, deletion, and/or substitution of one or a plurality of nucleotides in the nucleotide sequence of SEQ ID NO: 26 or 51; furthermore, a nucleotide sequence having a nucleotide sequence identity of 97% or more, 97.5% or more, 98% or more, 98.5% or more, 99% or more, or 99.5% or more to the nucleotide sequence of SEQ ID NO: 26 or 51; or a nucleotide sequence that hybridizes with the nucleotide sequence complementary to the nucleotide sequence of SEQ ID NO: 26 or 51 under highly stringent conditions. The nucleotide sequence of the tail tubular protein A gene may be the nucleotide sequence encoding the amino acid sequence of SEQ ID NO: 60.

[0221] A specific nucleotide sequence of the tail tubular protein B gene is, for example, the nucleotide sequence of SEQ ID NO: 27 (correctly SEQ ID NO: 58) or 52 encoding the amino acid sequence of SEQ ID NO: 25 (correctly SEQ ID NO: 57) or 50; the nucleotide sequence having addition, deletion, and/or substitution of one or a plurality of nucleotides in the nucleotide sequence of SEQ ID NO: 27 (correctly SEQ ID NO: 58) or 52; furthermore, a nucleotide sequence having a nucleotide sequence identity of 97% or more, 97.5% or more, 98% or more, 98.5% or more, 99% or more, or 99.5% or more to the nucleotide sequence of SEQ ID NO: 27 (correctly SEQ ID NO: 58) or 52; or a nucleotide sequence that hybridizes with the nucleotide sequence complementary to the nucleotide sequence of SEQ ID NO: 27 (correctly SEQ ID NO: 58) or 52 under highly stringent conditions. The nucleotide sequence of the tail tubular protein B gene may be the nucleotide sequence encoding the amino acid sequence of SEQ ID NO: 61.

[0222] Each of the proteins encoded by the tail tubular genes has bacteriolytic ability against target bacteria.

### (7-3) Genomic DNA

[0223] The 7th bacteriophage comprises the tail tubular gene. A gene and a nucleotide sequence other than the tail tubular gene are not limited. For example, the phage genomic DNA is a genomic DNA consisting of: the 44716 bp nucleotide sequence of SEQ ID NO: 28, the 44829 bp nucleotide sequence of SEQ ID NO: 29, or the 44585 bp nucleotide sequence of SEQ ID NO: 53: the nucleotide sequence having addition, deletion, and/or substitution of one or a plurality of nucleotides in the nucleotide sequence of the region other than the tail tubular gene within the nucleotide sequence of SEQ ID NO: 28, 29, or 53; furthermore, a nucleotide sequence having a sequence identity of 95% or more, 96% or more, 97% or more, 98% or more, or 99% or more to the nucleotide sequence of the region other than the tail tubular gene within the nucleotide sequence of SEQ ID NO: 28, 29, or 53; the nucleotide sequence having addition, deletion, and/or substitution of one or a plurality of nucleotides in the nucleotide sequence of SEQ ID NO: 28, 29, or 53; or furthermore, a nucleotide sequence having a sequence identity of 95.0% or more, 95.5% or more, 96.0% or more, 96.5% or more, 97.0% or more, 97.5% or more, 98.0% or more, 98.5% or more, 99.0% or more, 99.1% or more, 99.2% or more, 99.3% or more, 99.4% or more, 99.5% or more, 99.6% or more, 99.7% or more, 99.8% or more, or 99.9% or more when aligned with respect to the nucleotide sequence of SEQ ID NO: 28, 29, or 53.

### (7-4) Effects

[0224] A bacteriolytic agent of one or more embodiments of the present invention comprising the 7th phage can exhibit bacteriolytic ability against a wide range of various bacterial species of Xanthomonas genus, and can be used for various plant diseases.

[0225] Generally, a phage with too high specificity cannot cover the diversity of target bacteria and has a limited effect. Additionally, it is more preferable, from an industrial viewpoint, that a phage may be used for a plurality of plant diseases. Accordingly, a phage that exhibits bacteriolytic ability against two or more bacterial species as a bacteriolytic agent comprising the 7th phage according to one or more embodiments of the present invention is extremely useful.

### <8th Phage>

[0226] The 8th phage is characterized by having a genomic DNA sequence comprising a specific nucleotide sequence and exhibits specific bacteriolytic ability against target bacteria.

### (8-1) Genomic DNA

[0227] The genomic DNA sequence may be a genomic DNA sequence comprising or consisting of: the nucleotide sequence of any of SEQ ID NOs: 32 to 36 (44388 bp, 44377 bp, 45279 bp, 44378 bp, and 44408 bp respectively); the nucleotide sequence having addition, deletion, and/or substitution of one or a plurality of nucleotides in the nucleotide sequence of any of SEQ ID NOs: 32 to 36; or a nucleotide sequence having a sequence identity of 80% or more, 81% or more, 82% or more, 83% or more, 84% or more, 85% or more, 86% or more, 87% or more, 88% or more, 89% or more, 90% or more, 90.5% or more, 91.0% or more, 91.5% or more, 92.0% or more, 92.5% or more, 93.0% or more, 93.5% or more, 94.0% or more, 94.5% or more, 95.0% or more, 95.5% or more, 96.0% or more, 96.5% or more, 97.0% or more, 97.5% or more, 98.0% or more, 98.5% or more, 99.0% or more, 99.1% or more, 99.2% or more, 99.3% or more, 99.4% or more, 99.5% or more, 99.6% or more, 99.7% or more, 99.8% or more, or 99.9% or more when aligned with respect to the nucleotide sequence of any of SEQ ID NOs: 32 to 36.

### (8-2) Effects

[0228] A bacteriolytic agent of one or more embodiments of the present invention comprising the 8th phage can exhibit bacteriolytic ability against bacteria of the Xanthomonas genus and can be used for a plant disease.

### <9th Phage>

[0229] The 9th phage is characterized by comprising, in the genomic DNA, a gene encoding a tail tubular protein composed of a specific amino acid sequence and exhibits bacteriolytic ability specifically to target bacteria.

### (9-1) Tail Tubular Protein

[0230] The tail tubular protein encompasses a tail tubular protein A and a tail tubular protein B. The tail tubular protein A consists of the amino acid sequence of SEQ ID NO: 37 composed of 206 amino acid residues, the amino acid sequence having addition, deletion, and/or substitution of one or a plurality of amino acids in the amino acid sequence of SEQ ID NO: 37, or an amino acid sequence having an amino acid sequence identity of 92% or more, 93% or more, 94% or more, 95% or more, 96% or more, 97% or more, 97.5% or more, 98% or more, 98.5% or more, 99% or more, or 99.5% or more to the amino acid sequence of SEQ ID NO: 37.

[0231] The tail tubular protein B consists of the amino acid sequence of SEQ ID NO: 38 or 54 composed of 847 amino acid residues, the amino acid sequence having addition, deletion, and/or substitution of one or a plurality of amino acids in the amino acid sequence of SEQ ID NO: 38 or 54, or an amino acid sequence having an amino acid sequence identity of 92% or more, 93% or more, 94% or more, 95% or more, 96% or more, 97% or more, 97.5% or more, 98% or more, 98.5% or more, 99% or more, 99.1% or more, 99.2% or more, 99.3% or more, 99.4% or more, or 99.5% or more to the amino acid sequence of SEQ ID NO: 38 or 54.

[0232] The amino acid substitution here may comprise an amino acid substitution at one or more positions selected from the group consisting of positions 61, 108, 404, 679, 682, and 727 in the amino acid sequence of SEQ ID NO: 38 or 54. The substitutions may include substitutions, for example, at two or more, three or more, four or more, five or more, or all positions among these positions.

[0233] The amino acid substitution is not particularly limited to any specific type. For example, the substitution may be a conservative substitution or may comprise one or a plurality of nonconservative substitutions. For example, the substitution may be in the amino acid group having a low-polarity side chain (Gly, Asn, Gln, Ser, Thr, Cys, Tyr, Leu, Val, Ile, Val, Ala, Met, and Pro). For example, the substitution may be between the uncharged polar amino acid group (Gly, Asn, Gln, Ser, Thr, Cys, or Tyr) or the neutral amino acid group having a hydrophilic side chain (Asn, Gln, Thr, Ser, Tyr, or Cys) and the neutral amino acid group (Gly, Ile, Val, Leu, Ala, Met, or Pro). More specifically, the substitution may be, for example, between threonine (Thr) and alanine (Ala).

[0234] A specific example of the amino acid sequence may be the amino acid sequence of SEQ ID NO: 59. This amino acid sequence is the same amino acid sequence as SEQ ID NO: 38, except that the amino acids and the positions are as follows: the amino acid at position 61 is threonine (Thr) or alanine (Ala); the amino acid at position 108 is glutamine (Gln) or lysine (Lys); the amino acid at position 404 is proline (Pro) or glutamine (Gln); the amino acid at position 679 is proline (Pro) or serine (Ser); the amino acid at position 682 is threonine (Thr) or alanine (Ala); and the amino acid at position 727 is isoleucine (Ile) or valine (Val).

[0235] A phage in which the amino acid sequence of the tail tubular protein B consists of the amino acid sequence having addition, deletion, and/or substitution of one or a plurality of amino acids in the amino acid sequence of SEQ ID NO: 59, or the amino acid sequence having an amino acid sequence identity of 92% or more, 93% or more, 94% or more, 95% or more, 96% or more, 97% or more, 97.5% or more, 98% or more, 98.5% or more, 99% or more, 99.1% or more, 99.2% or more, 99.3% or more, 99.4% or more, or 99.5% or more to the amino acid sequence of SEQ ID NO: 59 is also encompassed in the 9th phage of one or more embodiments of the present invention.

[0236] Each of the tail tubular proteins is characterized by having an effect on target-bacteria-specific recognizing ability.

### (9-2) Tail Tubular Gene

[0237] The 9th bacteriophage comprises, in the genomic DNA of the phage, a tail tubular gene consisting of a nucleotide sequence encoding the tail tubular protein.

[0238] The tail tubular gene is not particularly limited, as long as it encodes a tail tubular protein. The tail tubular gene encompasses a tail tubular protein A gene and a tail tubular protein B gene.

[0239] A specific nucleotide sequence of the tail tubular protein A gene is, for example, the nucleotide sequence of SEQ ID NO: 39 encoding the amino acid sequence of SEQ ID NO: 37; the nucleotide sequence having addition, deletion, and/or substitution of one or a plurality of nucleotides in the nucleotide sequence of SEQ ID NO: 39; furthermore, a nucleotide sequence having a nucleotide sequence identity of 90% or more, 95% or more, 96% or more, 97% or more, 97.5% or more, 98% or more, 98.5% or more, 99% or more, or 99.5% or more to the nucleotide sequence of SEQ ID NO: 39; or a nucleotide sequence that hybridizes with the nucleotide sequence complementary to the nucleotide sequence of SEQ ID NO: 39 under highly stringent conditions. The nucleotide sequence of the tail tubular protein A gene may be the nucleotide sequence encoding the amino acid sequence of SEQ ID NO: 59.

[0240] A specific nucleotide sequence of the tail tubular protein B gene is, for example, the nucleotide sequence of SEQ ID NO: 40 or 55 encoding the amino acid sequence of SEQ ID NO: 38 or 54; the nucleotide sequence having addition, deletion, and/or substitution of one or a plurality of nucleotides in the nucleotide sequence of SEQ ID NO: 40 or 55; furthermore, a nucleotide sequence having a nucleotide sequence identity of 90% or more, 95% or more, 96% or more, 97% or more, 97.5% or more, 98% or more, 98.5% or more, 99% or more, or 99.5% or more to the nucleotide sequence of SEQ ID NO: 40 or 55; or a nucleotide sequence that hybridizes with the nucleotide sequence complementary to the nucleotide sequence of SEQ ID NO: 40 or 55 under highly stringent conditions. A specific nucleotide sequence of the tail tubular protein B gene is, for example, the nucleotide sequence encoding the amino acid sequence of SEQ ID NO: 59.

[0241] Each of the proteins encoded by the tail tubular genes has bacteriolytic ability against target bacteria.

### (9-3) Genomic DNA

[0242] The 9th bacteriophage comprises the tail tubular gene. A gene and a nucleotide sequence other than the tail tubular gene are not limited. For example, the phage genomic DNA is a genomic DNA consisting of: the 43667 bp nucleotide sequence of SEQ ID NO: 41 or the 43336 bp nucleotide sequence of SEQ ID NO: 56: the nucleotide sequence having addition, deletion, and/or substitution of one or a plurality of nucleotides in the nucleotide sequence of the region other than the tail tubular gene within the nucleotide sequence of SEQ ID NO: 41 or 56; furthermore, a nucleotide sequence having a sequence identity of 80% or more, 81% or more, 82% or more, 83% or more, 84% or more, 85% or more, 86% or more, 87% or more, 88% or more, 89% or more, 90% or more, 91% or more, 92% or more, 93% or more, 94% or more, 95% or more, 96% or more, 97% or more, 98% or more, or 99% or more to the nucleotide sequence of the region other than the tail tubular gene within the nucleotide sequence of SEQ ID NO: 41 or 56; the nucleotide sequence having addition, deletion, and/or substitution of one or a plurality of nucleotides in the nucleotide sequence of SEQ ID NO: 41 or 56; or furthermore, a nucleotide sequence having a sequence identity of 90% or more, 91% or more, 92% or more, 93% or more, 94% or more, 95.0% or more, 95.5% or more, 96.0% or more, 96.5% or more, 97.0% or more, 97.5% or more, 98.0% or more, 98.5% or more, 99.0% or more, 99.1% or more, 99.2% or more, 99.3% or more, 99.4% or more, 99.5% or more, 99.6% or more, 99.7% or more, 99.8% or more, or 99.9% or more when aligned with respect to the nucleotide sequence of SEQ ID NO: 41 or 56.

### (9-4) Effects

[0243] A bacteriolytic agent of one or more embodiments of the present invention can exhibit bacteriolytic ability against a wide range of various bacterial species of Xanthomonas genus and can be used for various plant diseases.

[0244] Generally, a phage with too high specificity cannot cover the diversity of target bacteria and has a limited effect. Additionally, it is more preferable, from an industrial viewpoint, that a phage may be used for a plurality of plant diseases. Accordingly, a phage that exhibits bacteriolytic ability against two or more bacterial species as a bacteriolytic agent of one or more embodiments of the present invention is extremely useful.

### <10th Phage>

[0245] The 10th phage is characterized by comprising, in the genomic DNA, a gene encoding a tail fiber protein consisting of a specific amino acid sequence and exhibits bacteriolytic ability specifically to target bacteria.

### (10-1) Tail Fiber Protein

[0246] The tail fiber protein consists of the amino acid sequence of SEQ ID NO: 42 composed of 568 amino acid residues, the amino acid sequence having addition, deletion, and/or substitution of one or a plurality of amino acids in the amino acid sequence of SEQ ID NO: 42, or an amino acid sequence having an amino acid sequence identity of 90% or more, 95% or more, 96% or more, 97% or more, 98% or more, or 99% or more to the amino acid sequence of SEQ ID NO: 42. Each of the tail fiber proteins is characterized by having target-bacteria-specific recognizing ability.

### (10-2) Tail Fiber Gene

[0247] The 10th bacteriophage comprises, in the genomic DNA of the phage, a tail fiber gene consisting of a nucleotide sequence encoding the tail fiber protein.

[0248] A specific nucleotide sequence of the tail fiber gene is, for example, the nucleotide sequence of SEQ ID NO: 43 encoding the amino acid sequence of SEQ ID NO: 42; the nucleotide sequence having addition, deletion, and/or substitution of one or a plurality of nucleotides in the nucleotide sequence of SEQ ID NO: 43; furthermore, a nucleotide sequence having a nucleotide sequence identity of 90% or more, 95% or more, 96% or more, 97% or more, 98% or more, or 99% or more to the nucleotide sequence of SEQ ID NO: 43; or a nucleotide sequence that hybridizes with the nucleotide sequence complementary to the nucleotide sequence of SEQ ID NO: 43 under highly stringent conditions.

[0249] Each of the proteins encoded by the tail fiber genes has bacteriolytic ability against target bacteria.

### (10-3) Genomic DNA

[0250] The 10th bacteriophage comprises the tail fiber gene. A gene other than the tail fiber gene and a nucleotide sequence are not limited. For example, the phage genomic DNA is a genomic DNA consisting of: the 76340 bp nucleotide sequence of SEQ ID NO: 44; the nucleotide sequence having addition, deletion, and/or substitution of one or a plurality of nucleotides in the nucleotide sequence of the region other than the tail fiber gene within the nucleotide sequence of SEQ ID NO: 44; furthermore, a nucleotide sequence having a sequence identity of 80% or more, 81% or more, 82% or more, 83% or more, 84% or more, 85% or more, 86% or more, 87% or more, 88% or more, 89% or more, 90% or more, 91% or more, 92% or more, 93% or more, 94% or more, 95% or more, 96% or more, 97% or more, 98% or more, or 99% or more to the nucleotide sequence of the region other than the tail fiber gene within the nucleotide sequence of SEQ ID NO: 44; the nucleotide sequence having addition, deletion, and/or substitution of one or a plurality of nucleotides in the nucleotide sequence of SEQ ID NO: 44; or furthermore, a nucleotide sequence having a sequence identity of 90.0% or more, 90.5% or more, 91.0% or more, 91.5% or more, 92.0% or more, 92.5% or more, 93.0% or more, 93.5% or more, 94.0% or more, 94.5% or more, 95.0% or more, 95.5% or more, 96.0% or more, 96.5% or more, 97.0% or more, 97.5% or more, 98.0% or more, 98.5% or more, 99.0% or more, 99.1% or more, 99.2% or more, 99.3% or more, 99.4% or more, 99.5% or more, 99.6% or more, 99.7% or more, 99.8% or more, or 99.9% or more when aligned with respect to the nucleotide sequence of SEQ ID NO: 44.

### (10-4) Effects

[0251] A bacteriolytic agent of one or more embodiments of the present invention can exhibit bacteriolytic ability against a wide range of various bacterial species of Xanthomonas genus and can be used for various plant diseases.

### 2. Composition for Plant Disease Control

### 2-1. Overview

[0252] A second aspect of one or more embodiments of the present invention is a composition, particularly a composition usable for plant disease control. A composition of one or more embodiments of the present invention is characterized by comprising the bacteriolytic agent according to the first aspect as an active component.

[0253] Using the composition of one or more embodiments of the present invention for plant disease control can provide sustainable plant protectives (agricultural chemicals) against a bacterial plant disease, wherein the protectives are safe for the human body, free from drug poisoning to the environment, and capable of preventing or treating a specific plant disease of interest.

[0254] In this regard, the expression “composition for plant disease control” as used herein refers to the composition of the present disclosure used for plant disease control.

### 2-2. Constitution

### 2-2-1. Component

[0255] A composition of one or more embodiments of the present invention comprises, as an essential component, a bacteriophage that is a bacteriolytic agent described in the first aspect as an active component. Additionally, the composition may comprise an agriculturally acceptable carrier and/or medium to the extent that the bacteriolytic ability of the phage to target bacteria is not impaired or inhibited. Furthermore, the composition may comprise other active components, if desired. Each component is specifically described below.

### (1) Active Component (Bacteriolytic Agent)

[0256] A composition of one or more embodiments of the present invention comprises the bacteriolytic agent according to the first aspect as an essential active component. Because this active component lyses the target bacteria of one or more embodiments of the present invention, the composition for plant disease control can prevent or treat a plant disease caused by the target bacteria.

[0257] The specific constitution of the bacteriolytic agent has been described in detail in the first aspect and is thus omitted here.

[0258] When the composition is used for plant disease control, the amount of the active component comprised per unit amount in the composition depends on various conditions, such as the dosage form, the kind of plant pathogenic bacteria, the kind of a target plant, the site of application, and the method of application. The amount to be comprised may be sufficient for the phage, as an active component, to contact and infect plant pathogenic bacteria that have infected a target plant. Accordingly, it can be determined within the scope of common technical knowledge in the art, considering the conditions such that the bacteriolytic agent comprised in a composition for plant disease control according to one or more embodiments of the present invention is in an effective amount for target bacteria after application.

[0259] A composition for plant disease control according to one or more embodiments of the present invention may comprise, as an active component(s) in combination, one or more other phages that specifically recognize bacteria of the Xanthomonas genus and have bacteriolytic ability, as specifically exemplified below. For example, even if target bacteria are the same between phages, the phages, if capable of recognizing different cell surface receptors, can be expected to allow a synergistic effect or supportive effect of the bacteriolytic ability, depending on the combination.

[0260] When a composition of one or more embodiments of the present invention comprises a plurality of kinds of phages, the specific kind of each phage is not particularly limited. For example, the composition may comprise, as an active component, only the phage described herein, or may additionally comprise other arbitrary phages as a further active component. Additionally, the composition may comprise phages having a similar host range to each other and/or phages having not similar host range from each other. Examples of a combination of phages having a similar host range include: a combination that exhibits bacteriolytic ability against the same bacteria in the same genus (for example, Xanthomonas genus) in common; a combination of phages that exhibits bacteriolytic ability against one or more same species of bacteria in the same genus (for example, Xanthomonas arboricola) in common; and a combination of phages that exhibit bacteriolytic ability against one or more same pathovars of bacteria in the same genus (for example, Xanthomonas arboricola pv. pruni) in common. Additionally, examples of a combination of phages having not similar host range include: a combination of a phage that exhibits, and a phage that does not exhibit, bacteriolytic ability against bacteria belonging to a specific genus (for example, Xanthomonas genus); a combination of a phage that exhibits, and a phage that does not exhibit, bacteriolytic ability against bacteria of a specific pathovar in a specific genus (for example, Xanthomonas arboricola pv. pruni); a combination of a phage that exhibits, and a phage that does not exhibit, bacteriolytic ability against bacteria of a specific species in a specific genus (for example, Xanthomonas arboricola); and a combination of a phage that specifically exhibits, and a phage that nonspecifically exhibits, bacteriolytic ability against bacteria of a specific genus (for example, Xanthomonas genus), species (for example, Xanthomonas arboricola), or pathovar (for example, Xanthomonas arboricola pv. pruni).

[0261] The composition of one or more embodiments of the present invention may comprise, for example, a combination of two or more kinds of phages from the 1st to 10th phage described herein. Specifically, the composition may comprise, for example, a combination of two or more phages selected from the group consisting of the 1st phage, 2nd phage, 7th phage, 9th phage, and 10th phage. Alternatively, the composition may comprise, for example, a combination of two or more phages selected from the group consisting of the 3rd phage, 4th phage, 5th phage, 6th phage, and 8th phage. Furthermore, the composition may comprise, for example, a combination of the following: one or more phages selected from the group consisting of the 1st phage, 2nd phage, 7th phage, 9th phage, and 10th phage; and one or more phages selected from the group consisting of the 3rd phage, 4th phage, 5th phage, 6th phage, and 8th phage.

[0262] The number of phages comprised in the composition of one or more embodiments of the present invention, from the 1st to the 10th phage described herein, is not particularly limited, as long as it is one or more. The composition may comprise, for example, 2 or more kinds, 3 or more kinds, 4 or more kinds, 5 or more kinds, 6 or more kinds, 7 or more kinds, 8 or more kinds, 9 or more kinds, or 10 or more kinds of phages. Additionally, the composition of one or more embodiments of the present invention may comprise a plurality of kinds of phages that have genomic DNA sequences different from each other but are encompassed in the scope of each phage (for example, the 2nd phage or the like). Specifically, the composition may comprise two or more kinds of 2nd phages and/or two or more kinds of 7th phages.

[0263] For example, the phages encompass a phage comprising, in the genomic DNA, a gene encoding the amino acid sequence of SEQ ID NO: 1 as an amino acid sequence common to the tail fiber proteins, specifically a phage comprising, in the genomic DNA, a gene encoding the amino acid sequence of any of SEQ ID NOs: 2 to 4, and a phage comprising, in the genomic DNA, a gene encoding the amino acid sequence having addition, deletion, and/or substitution of one or a plurality of amino acids in the amino acid sequence of any of SEQ ID NOs: 1 to 4, or an amino acid sequence having a sequence identity of 90% or more to any of SEQ ID NOs: 1 to 4. Specific examples of such a gene encoding an amino acid sequence include a gene consisting of: the nucleotide sequence of any of SEQ ID NOs: 5 to 7; the nucleotide sequence having addition, deletion, and/or substitution of one or a plurality of nucleotides in the nucleotide sequence of any of SEQ ID NOs: 5 to 7; or a nucleotide sequence having a sequence identity of 90% or more to any of SEQ ID NOs: 5 to 7. Examples of the genomic DNA of a phage comprising such a gene include: a genomic DNA consisting of the nucleotide sequence of any of SEQ ID NOs: 8 to 10; and a genomic DNA consisting of: the nucleotide sequence having addition, deletion, and/or substitution of one or a plurality of nucleotides in the nucleotide sequence of any of SEQ ID NOs: 8 to 10; a nucleotide sequence having a sequence identity of 90% or more to any of SEQ ID NOs: 8 to 10; the nucleotide sequence having addition, deletion, and/or substitution of one or a plurality of nucleotides in the nucleotide sequence other than the nucleotide sequence encoding the amino acid sequence of any of SEQ ID NOs: 2 to 4 within the nucleotide sequence of any of SEQ ID NOs: 8 to 10; or a nucleotide sequence having a sequence identity of 80% or more to the nucleotide sequence other than the nucleotide sequence encoding the amino acid sequence of any of SEQ ID NOs: 2 to 4 within the nucleotide sequence of any of SEQ ID NOs: 8 to 10.

[0264] Additional examples include: a phage comprising, in the genomic DNA, a gene encoding the amino acid sequence of SEQ ID NO: 11 or 45 as the amino acid sequence of the tail fiber protein; and a phage comprising, in the genomic DNA, a gene encoding the amino acid sequence having addition, deletion, and/or substitution of one or a plurality of amino acids other than at positions 278 and 350 in the amino acid sequence of SEQ ID NO: 11, or an amino acid sequence having a sequence identity of 90% or more to SEQ ID NO: 11. Specific examples of such a gene encoding an amino acid sequence include a gene consisting of: the nucleotide sequence of SEQ ID NO: 12 or 46; the nucleotide sequence having addition, deletion, and/or substitution of one or a plurality of nucleotides in the nucleotide sequence of SEQ ID NO: 12 or 46; or a nucleotide sequence having a sequence identity of 90% or more to SEQ ID NO: 12 or 46. Furthermore, specific examples of the genomic DNA of a phage comprising such a gene include: a genomic DNA consisting of the nucleotide sequence of SEQ ID NO: 13, 47, or 48; and a genomic DNA consisting of: the nucleotide sequence having addition, deletion, and/or substitution of one or a plurality of nucleotides in the nucleotide sequence of SEQ ID NO: 13, 47, or 48; a nucleotide sequence having a sequence identity of 90% or more to SEQ ID NO: 13, 47, or 48; the nucleotide sequence having addition, deletion, and/or substitution of one or a plurality of nucleotides in the nucleotide sequence other than the nucleotide sequence encoding the amino acid sequence of SEQ ID NO: 11 or 45 within the nucleotide sequence of SEQ ID NO: 13, 47, or 48; or a nucleotide sequence having a sequence identity of 80% or more to the nucleotide sequence other than the nucleotide sequence encoding the amino acid sequence of SEQ ID NO: 11 or 45 within the nucleotide sequence of SEQ ID NO: 13, 47, or 48.

[0265] Furthermore, examples of the genomic DNA of the phage include: a genomic DNA comprising the nucleotide sequence of any of SEQ ID NOs: 14, 18, 19, and 32 to 36; a genomic DNA comprising the nucleotide sequence having addition, deletion, and/or substitution of one or a plurality of nucleotides in the nucleotide sequence of any of SEQ ID NOs: 14, 18, 19, and 32 to 36; and a genomic DNA comprising a nucleotide sequence having a sequence identity of 90% or more to any of SEQ ID NOs: 14, 18, 19, and 32 to 36.

[0266] Additional examples include: a phage comprising, in the genomic DNA, a gene encoding the amino acid sequence of SEQ ID NO: 15 or 42 as the amino acid sequence of the tail fiber protein; and a phage comprising, in the genomic DNA, a gene encoding the amino acid sequence having addition, deletion, and/or substitution of one or a plurality of amino acids in the amino acid sequence of SEQ ID NO: 15 or 42, or an amino acid sequence having a sequence identity of 90% or more to SEQ ID NO: 15 or 42. Specific examples of such a gene encoding an amino acid sequence include a gene consisting of: the nucleotide sequence of SEQ ID NO: 16 or 43; the nucleotide sequence having addition, deletion, and/or substitution of one or a plurality of nucleotides in the nucleotide sequence of SEQ ID NO: 16 or 43; or a nucleotide sequence having a sequence identity of 90% or more to SEQ ID NO: 16 or 43. Furthermore, specific examples of the genomic DNA of a phage comprising such a gene include: a genomic DNA consisting of the nucleotide sequence of SEQ ID NO: 17 or 44; and a genomic DNA consisting of: the nucleotide sequence having addition, deletion, and/or substitution of one or a plurality of nucleotides in the nucleotide sequence of SEQ ID NO: 17 or 44; a nucleotide sequence having a sequence identity of 90% or more to SEQ ID NO: 17 or 44; the nucleotide sequence having addition, deletion, and/or substitution of one or a plurality of nucleotides in the nucleotide sequence other than the nucleotide sequence encoding the amino acid sequence of SEQ ID NO: 15 or 42 within the nucleotide sequence of SEQ ID NO: 17 or 44; or a nucleotide sequence having a sequence identity of 80% or more to the nucleotide sequence other than the nucleotide sequence encoding the amino acid sequence of SEQ ID NO: 15 or 42 within the nucleotide sequence of SEQ ID NO: 17 or 44.

[0267] Additional examples include: a phage comprising, in the genomic DNA, a gene encoding the amino acid sequence of SEQ ID NO: 21; and a phage comprising, in the genomic DNA, a gene encoding the amino acid sequence having addition, deletion, and/or substitution of one or a plurality of amino acids in the amino acid sequence of SEQ ID NO: 21, or an amino acid sequence having a sequence identity of 90% or more to SEQ ID NO: 21. Specific examples of such a gene encoding an amino acid sequence include a gene consisting of: the nucleotide sequence of SEQ ID NO: 22; the nucleotide sequence having addition, deletion, and/or substitution of one or a plurality of nucleotides in the nucleotide sequence of SEQ ID NO: 22; or a nucleotide sequence having a sequence identity of 90% or more to SEQ ID NO: 22. Furthermore, specific examples of the genomic DNA of a phage comprising such a gene include: a genomic DNA consisting of the nucleotide sequence of SEQ ID NO: 23; and a genomic DNA consisting of: the nucleotide sequence having addition, deletion, and/or substitution of one or a plurality of nucleotides in the nucleotide sequence of SEQ ID NO: 23; a nucleotide sequence having a sequence identity of 90% or more to SEQ ID NO: 23; the nucleotide sequence having addition, deletion, and/or substitution of one or a plurality of nucleotides in the nucleotide sequence other than the nucleotide sequence encoding the amino acid sequence of SEQ ID NO: 21 within the nucleotide sequence of SEQ ID NO: 23; or a nucleotide sequence having a sequence identity of 80% or more to the nucleotide sequence other than the nucleotide sequence encoding the amino acid sequence of SEQ ID NO: 21 within the nucleotide sequence of SEQ ID NO: 23.

[0268] Further examples include: a phage comprising, in the genomic DNA, a TTPA (Tail-Tubular protein A) gene consisting of the amino acid sequence of SEQ ID NO: 24, 49, 60, or 37 and a TTPB (Tail-Tubular protein B) gene consisting of the amino acid sequence of SEQ ID NO: 25 (correctly SEQ ID NO: 57), 50, 61, 38, 54, or 59; and a phage comprising, in the genomic DNA, a TTPA gene encoding the amino acid sequence having addition, deletion, and/or substitution of one or a plurality of amino acids in the amino acid sequence of SEQ ID NO: 24, 49, 37, 25 (correctly SEQ ID NO: 57), 50, 38, 54, or 59, or an amino acid sequence having a sequence identity of 90% or more to SEQ ID NO: 24, 49, 37, 25 (correctly SEQ ID NO: 57), 50, 38, 54, or 59. Specific examples of such a gene encoding an amino acid sequence include a gene consisting of: the nucleotide sequence of SEQ ID NO: 26, 39, 27 (correctly SEQ ID NO: 58), 40, or 55; the nucleotide sequence having addition, deletion, and/or substitution of one or a plurality of nucleotides in the nucleotide sequence of 26, 39, 27 (correctly SEQ ID NO: 58), 40, or 55; or a nucleotide sequence having a sequence identity of 90% or more to SEQ ID NO: 26, 39, 27 (correctly SEQ ID NO: 58), 40, or 55. Furthermore, specific examples of the genomic DNA of a phage comprising such a gene include: a genomic DNA consisting of the nucleotide sequence of SEQ ID NO: 28, 29, 41, or 56; and a genomic DNA consisting of: the nucleotide sequence having addition, deletion, and/or substitution of one or a plurality of nucleotides in the nucleotide sequence of SEQ ID NO: 28, 29, 41, or 56; a nucleotide sequence having a sequence identity of 90% or more to SEQ ID NO: 28, 29, 41, or 56; the nucleotide sequence having addition, deletion, and/or substitution of one or a plurality of nucleotides in the nucleotide sequence other than the nucleotide sequence encoding the amino acid sequence of SEQ ID NO: 24, 37, 25 (correctly SEQ ID NO: 57), 50, 38, 54, or 59 within the nucleotide sequence of SEQ ID NO: 28, 29, 41, or 45; or a the nucleotide sequence having a sequence identity of 80% or more to the nucleotide sequence other than the nucleotide sequence encoding the amino acid sequence of SEQ ID NO: 24, 37, 25 (correctly SEQ ID NO: 57), 50, 38, 54, or 59 within the nucleotide sequence of SEQ ID NO: 28, 29, 41, or 56.

[0269] The sequence identity herein is not particularly limited. Specifically, the sequence identity may be, for example, 80% or more, 81% or more, 82% or more, 83% or more, 84% or more, 85% or more, 86% or more, 87% or more, 88% or more, 89% or more, 90.0% or more, 90.5% or more, 91.0% or more, 91.5% or more, 92.0% or more, 92.5% or more, 93.0% or more, 93.5% or more, 94.0% or more, 94.5% or more, 95.0% or more, 95.5% or more, 96.0% or more, 96.5% or more, 97.0% or more, 97.5% or more, 98.0% or more, 98.5% or more, 99.0% or more, 99.1% or more, 99.2% or more, 99.3% or more, 99.4% or more, 99.5% or more, 99.6% or more, 99.7% or more, 99.8% or more, or 99.9% or more to a sequence as a reference.

### (2) Agriculturally Acceptable Carrier and Medium

[0270] An “agriculturally acceptable carrier and/or medium” refers to a substance that facilitates the application of a composition, can maintain the survivability and infectiousness of a phage as an active component, and/or can control the rate of action, and that, when applied outdoor, has no or an extremely small harmful influence on an environment such as the soil and the water quality, and further has no or an extremely low harmfulness to an animal, particularly a human.

### (2-1) Carrier

[0271] Specific examples of agriculturally acceptable carriers include surfactants, protective agents, and excipients. Additionally, if desired, a wetting agent, emulsifying agent, pH buffering agent, and the like may be utilized in small amounts. The carrier may be blended in advance, or may be blended immediately before application.

[0272] The surfactant has an effect on enhancing the physicochemical properties of the composition with respect to parts of a plant, the properties including hygroexpansivity (wetting capability), emulsifying capability, dispersibility, permeating capability, adhesiveness, defoaming capability, and spreading capability. The surfactant may be utilized as a main component of an agricultural adjuvant called a spreading agent. Examples of spreading agents include nonionic surfactants, combinations of a nonionic surfactant and an anionic surfactant, paraffins, and polyoxyethylene resin acid esters. More specific examples include polyoxyethylenealkyl ether compounds, polyoxyethylene fatty acid ester compounds, lignin sulfonic salt compounds, naphthylmethanesulfonic acid salt It compounds, alkylsulfosuccinic acid salt compounds, and tetraalkylammonium salt compounds.

[0273] A protective agent for a phage is expected to have an effect, such as decreasing damage due to ultraviolet rays. Examples include skim milks, caseins, and gelatins.

[0274] Examples of excipients include glucoses, lactoses, sucroses, gelatins, starches, malts, and flours.

### (2-2) Solvent

[0275] Specific examples of agriculturally acceptable solvents include water (including an aqueous solution), buffers, and liquid culture media. The solvent may be an aseptic liquid.

### (3) Another Active Component

[0276] A composition of one or more embodiments of the present invention may comprise, in addition to a bacteriolytic agent according to the first aspect, one or more other active components having the same and/or different pharmacologic actions to the extent that the component(s) does/do not affect the bacteriolytic ability of the phage constituting the bacteriolytic agent.

[0277] The (an) other active component(s) is/are not limited to any kind. For example, the phage may have bacteriolytic ability against the same and/or different bacteria. Examples of the phage having bacteriolytic ability against the same bacteria include another phage that specifically recognizes and is attached to bacteria of the Xanthomonas genus in the same manner as a phage constituting a bacteriolytic agent according to the first aspect.

[0278] Other examples include, as another active component, insecticides, herbicides, fertilizers (for example, urea, ammonium nitrate, and perphosphate), and, if desired, known chemical pesticides, antibiotics, and biological agricultural chemicals.

### 2-2-2. Dosage Form

[0279] The dosage form of a composition of one or more embodiments of the present invention, when the composition is used for plant disease control, may be any dosage form, as long as it is possible that a site of infection of target bacteria on a target plant, the fixability to a target plant, and/or the easiness of infection of a phage as an active component against target bacteria is maintained. For example, the composition for plant disease control may be suspended in a suitable solution to be formed into a liquid agent or a dispersible (water-dispersible) agent, or may be mixed with a carrier and solidified to be formed into a solid-state powder, granule, or gel. For example, when the site of infection of target bacteria on a target plant is a leaf, flower, fruit, stem, branch, or trunk in the aerial part, a liquid, dispersible agent, or gel, which widely spreads in such a site of infection, and has high fixability, is suitable, without limitation. On the other hand, when the site of infection of target bacteria is a root or an underground stem in the underground part, a powder or granule, that is released in a sustained manner in soil, and can sustainably achieve an effect at the site of infection, is suitable, without limitation.

### 2-3. Method for Application

[0280] When a composition of one or more embodiments of the present invention is used as a composition for plant disease control, a method for applying the composition may be a method known in the art, and is not particularly limited, as long as it is possible to apply the composition for plant disease control to a target plant. A phage as an active component of a composition for plant disease control can intrude through any part of the whole surface of the target plant, such as the stem-and-leaf part and the root part, and thus, may be applied by a suitable method in accordance with the purpose. For example, when the site of application is in an aerial part such as a stem-and-leaf part, the composition for plant disease control may be applied so as to come into direct contact with the site of application. The direct contact involves, for example, painting, spraying, scattering, or immersing the composition for plant disease control for the site of application. The application may be performed to the site, where it is infected or potentially infected by target bacteria, of a target plant. Additionally, the application may be indirect through soil when the site of application is in an underground part, such as a root, or by addition to a culture medium when the site is in the medium. “Soil” as used herein is not particularly limited, as long as it is possible to grow a target plant. Usually, a planting soil comprising a suitable nutrient, and having a suitable pH value is utilized. Where the soil is from is not limited. Additionally, a “culture medium” refers to a planting medium artificially prepared for a target plant. The medium may be a solid medium, such as an agar medium, or may be a liquid medium. The culture medium is, for example, an isolating bed, a root zone restriction pot, or a nursery. The composition of the culture medium may be a medium composition known in the art. The composition may be suitably selected according to the kind of plant, or the like.

### 2-4. Target Plant

[0281] A target plant for a composition for plant disease control according to one or more embodiments of the present invention is not particularly limited to any kind, as long as it is possible to develop a plant disease caused by the target bacteria of one or more embodiments of the present invention. The target plant may be either an angiosperm or a gymnosperm. Furthermore, the plant may be an herbaceous plant or a woody plant. Suitable specific examples of the target plant include agriculturally important plants, for example: crop plants such as cereal crops, vegetables, and fruits; and flowers and ornamental plants. Specific examples include monocotyledons, such as Poaceae plants (for example, rice, wheat, barley, corn, sugarcane, Sorghum, kaoliangs, and turfgrasses), Musaceae plants (for example, bananas), Amaryllidaceae plants (for example, Allium, onions, garlic, and garlic chives), and Liliaceae plants (for example, lilies and tulips). Additional examples include dicotyledons, such as Brassicaceae plants (for example, cabbages, radishes, Chinese cabbages, and rapeseeds), Asteraceae plants (for example, lettuces, burdocks, and Chrysanthemum), Fabaceae plants (for example, soybeans, peanuts, garden peas, phaseoli, lentils, chickpeas, fava beans, and licorice), Solanaceae plants (for example, tomatoes, eggplants, potatoes, tobaccos, bell peppers, red peppers, and petunia), Rosaceae plants (for example, strawberries, apples, pears, peaches, Eriobotrya, almonds, plums, roses, Japanese apricots, and cherries), Cucurbitaceae plants (for example, cucumbers, gourd, pumpkins, melons, and watermelons), Anacardiaceae plants (for example, mangoes, pistachios, and cashew nuts), Lauraceae plants (for example, avocadoes) Rutaceae plants (for example, mandarin oranges, grapefruits, lemons, and Citrus junos), Convolvulaceae plants (for example, sweet potatoes), Theaceae plants (for example, Camellia sinensis), and Vitaceae plants (for example, grapes).

### 2-5. Target Plant Disease

[0282] A target plant disease to which a composition for plant disease control according to one or more embodiments of the present invention is to be applied is any plant disease that is caused by the target bacteria of one or more embodiments of the present invention. The disease may be a plant disease caused by bacteria of the Xanthomonas genus. Examples include: bacterial spot observed in peaches and the like; bacterial blight observed in walnuts and the like; bacterial pustule observed in soybeans and the like; angular leaf spot observed in strawberries and the like; bacterial blight observed in tomatoes, bell peppers, lettuces, and the like; black rot observed in cabbages, Chinese cabbages, broccoli, and the like; bacterial canker observed in oranges, grapefruit, and the like; angular leaf spot observed in cotton and the like; and leaf blight observed in rice and the like.

### 3. Method for Controlling Plant Disease

### 3-1. Overview

[0283] A third aspect of one or more embodiments of the present invention is a method for controlling plant disease. A method for controlling plant disease according to one or more embodiments of the present invention is characterized by applying a composition for plant disease control according to the second aspect to a target plant to control a plant disease of the target plant.

[0284] A method for controlling plant disease according to one or more embodiments of the present invention can control a plant disease caused by bacteria, particularly bacteria of the Xanthomonas genus, in a target plant.

### 3-2. Method

[0285] A method for controlling plant disease according to one or more embodiments of the present invention comprises a contacting step as an essential step.

[0286] The “contacting step” is a step of contacting a composition for plant disease control according to the second aspect to the target plant. This step is basically in accordance with “2-3. Method for Application” in the second aspect regarding the composition for plant disease control.

[0287] In the present aspect, “contact” refers to contact between a composition for plant disease control and a target plant. More specifically, the contact is between the following: a bacteriolytic agent, i.e., a phage, according to the first aspect as an active component of a composition for plant disease control; and part of a target plant, preferably a site that is infected or to be potentially infected by target bacteria. This step is intended to infect a phage as an active component with target bacteria, whereby the target bacteria are lysed. As a result, an effect on controlling the plant disease caused by target bacteria can be achieved.

[0288] The contact may be any of direct contact and indirect contact. The direct contact in the present aspect means that the composition for plant disease control is brought directly into contact with a predetermined site of the target plant. Specifically, for example, this means that a composition for plant disease control, in liquid form or gel form, is painted, sprayed, scattered, or immersed for part of a target plant. In this case, the part of a plant as a target of contact is mainly a site such as a leaf, flower, fruit, stem, branch, and/or trunk. On the other hand, the indirect contact in the present aspect means that the composition for plant disease control is brought into contact with a predetermined site of the target plant via an intermedium. For example, this means that a composition for plant disease control, in particulate form, is applied into the soil around the root of a target plant. The phage, as an active component, is transported via water or the like in soil, and absorbed by the root.

### 3-3. Effects

[0289] A phage as an active component of a composition obtained by one or more embodiments of the present invention can kill target bacteria efficiently, and hence, is useful to prevent and inhibit a disease caused by target bacteria. Additionally, the specific bacteriolytic ability serves as a basis for detecting and identifying target bacteria, thus enabling a disease to be diagnosed. An agent that has been used customarily for bacteria of the Xanthomonas genus includes a copper agent or an antibiotic, but such an agent may cause drug poisoning or a disruption of the balance of a bacterial lawn. For example, some strains of Pseudomonas fluorescens have proved to have a plant-growth-promoting effect (Haas D., Defago G., Nature Reviews in Microbiology, 2005, 3 (4), 307-19), and a copper agent and an antibiotic have a high possibility of also killing such bacteria having a symbiotic relationship with a plant. On the other hand, since a phage is an organism-derived substance, there is no report of the manifestation of drug poisoning, and since a phage has high specificity, its influence on the balance of a bacterial lawn is extremely limited.

### 4. Method for Identifying Bacteria of the Xanthomonas Genus

### 4-1. Overview

[0290] A fourth aspect of one or more embodiments of the present invention is a method for identifying bacteria of the Xanthomonas genus. A method for identification according to one or more embodiments of the present invention is characterized by utilizing the host specificity of a phage constituting the bacteriolytic agent according to the first aspect to identify bacteria of the Xanthomonas genus.

[0291] One or more embodiments of the present invention can determine and identify whether unidentified plant pathogenic bacteria causative of a plant disease are bacteria of the Xanthomonas genus.

### 4-2. Method

[0292] A method for identification according to one or more embodiments of the present invention comprises a culturing step, a mixing step, a mixture culturing step, and a determining step as essential steps, and additionally, an isolating step as an optional step. Each step is described below.

### (1) Isolating Step

[0293] The “isolating step” is a step of isolating subject bacteria from plant tissue affected by a plant disease. This step is an optional step, and may be performed if desired.

[0294] The “subject bacteria” refers to plant pathogenic bacteria, the species of which has not been revealed, and that are used for a method for identifying bacteria of the Xanthomonas genus in the fourth aspect or a method for detecting bacteria of the Xanthomonas genus in the below-described fifth aspect of the present disclosure.

[0295] The plant tissue may be any site of a plant that has developed a plant disease, and may be a site at which the symptom of the plant disease is recognized remarkably. For example, from a peach that has developed a shot hole disease of Prunus spp., a leaf with a disease observed therein may be used.

[0296] To isolate subject bacteria from plant tissue taken, a specimen with a disease observed therein may be immersed in a solvent such as water to extract the subject bacteria, and the specimen may be fragmented and crushed upon the extraction. Subsequently, the extraction liquid may be streaked on an agar culture medium, and a single colony may be picked.

### (2) Culturing Step

[0297] The “culturing step” is a step of culturing the subject bacteria isolated, and obtaining a culture preparation. Subject bacteria may be cultured by a method known in the art.

[0298] The “culture preparation” is obtained by culturing subject bacteria, and may be either liquid or solid.

[0299] In this step, subject bacteria are unidentified, and thus, the culture medium to be used in this step is desirably a medium that can culture a wide range of plant pathogenic bacteria. At least a culture medium that can culture bacteria of the Xanthomonas genus as target bacteria to be identified in one or more embodiments of the present invention is used. Such a culture medium may be, for example, a medium comprising one or more components selected from: protein enzymatic decomposition products such as peptone and tryptone; organism-derived extracts such as potato dextrose and yeast extracts; amino acids or salts thereof, such as glutamic acid; saccharides such as glucoses and sucroses; and inorganic salts such as sodium chloride, magnesium chloride, and potassium dihydrogen phosphate. Specific examples of the culture medium and the composition include LB media (tryptone, yeast extract, and sodium chloride), YPG media (yeast extract, peptone, and glucose), PD media (potato dextrose), peptone-supplemented Suwa's media (sucrose, glutamic acid, and peptone), and the like.

[0300] The subject bacteria isolated are seeded in the culture medium, and cultured under suitable culture conditions. A culture with stirring under culture conditions, for example, at 20 to 40° C., 20 to 30° C., 22 to 28° C., or 24 to 26° C., yields a culture preparation. The culture time is not limited, and may be any period of time, for example, the culture may be performed until the turbidity at 600 nm reaches approximately 1.0. The present step yields a culture solution of subject bacteria. Additionally, the culture may be a multi-step culture that is double-step or more. For example, a culture solution obtained by a culture in a solution medium can be supplemented with a soft agar containing liquid medium, poured into a solid medium such as an agar medium, solidified, and subjected to further culture.

### (3) Mixing Step

[0301] The “mixing step” is a step of mixing the culture preparation obtained in the culturing step and the bacteriolytic agent according to the first aspect to obtain a mixture.

[0302] The “mixture” is a mixture of a culture preparation and a bacteriolytic agent, and may be either liquid or solid.

[0303] The mixing method is not particularly limited, as long as it is capable of mixing the culture preparation and the bacteriolytic agent. The bacteriolytic agent according to the first aspect may be in a solid state, or may be suspended in water or a liquid culture medium, and added in a liquid state.

[0304] When the culture preparation and the bacteriolytic agent are both liquid, the capacity ratio of the culture preparation to the bacteriolytic agent may be 1:9, 2:8, 3:7, 4:6, 5:5, 6:4, 7:3, 8:2, or 9:1. After the addition, the culture preparation and the bacteriolytic agent may be mixed sufficiently by stirring or the like. On the other hand, when a soft agar containing liquid medium is superposed as described above, the culture preparation is solid. In this case, the bacteriolytic agent may be dropped on a solid culture preparation, such as on the surface of a gel, whereby both are mixed on the solid medium to obtain a mixture.

### (4) Mixture Culturing Step

[0305] The “mixture culturing step” is a step of culturing the mixture under predetermined conditions.

[0306] Here, in the culture of the mixture, the mixture may also be supplemented with a soft agar containing liquid medium, poured into a solid medium such as an agar medium, solidified, and subjected to further culture.

[0307] The basic procedure in this step are in accordance with the culturing step above. In this step, the culture may be based on, but not limited to, what is called a plaque assay method so that the bacteriolysis of the subject bacteria by a phage constituting the bacteriolytic agent can be more easily verified in the below-described determining step. For example, after part of the mixture solution is mixed with a soft agar medium having the same composition, and before the soft agar medium is solidified, the resulting mixture may be poured onto an agar medium having the same composition, and spread on the whole culture medium. Then, the mixture may be cultured under the same conditions as in the culturing step.

### (5) Determining Step

[0308] The “determining step” is a step of determining that the subject bacteria is bacteria of the Xanthomonas genus when the subject bacteria is lysed after the culturing step.

[0309] Without limitation, for example, when a plaque assay method is used, whether bacteriolysis occurs may be determined according to whether a plaque has been formed. A plaque exists on the soft agar medium, that is spread and solidified on the agar culture medium, after the above-described mixture culturing step, this result indicates that the subject bacteria has been lysed by an infection of a phage constituting a bacteriolytic agent of one or more embodiments of the present invention. Accordingly, the subject bacteria in this case can be determined to be bacteria of the Xanthomonas genus. On the other hand, when the subject bacteria proliferates on the whole agar culture medium, but no plaque at all exists, the subject bacteria can be determined not to be bacteria of the Xanthomonas genus.

[0310] To render the determination more accurate, a negative control and/or a positive control may be prepared simultaneously and used to verify that no plaque is generated in the negative control, and that a plaque is observed in the positive control, wherein the negative control is mixed with a culture medium comprising no bacteriolytic agent in the mixture culturing step, and wherein, for the positive control, bacteria of the Xanthomonas genus identified are used from the culturing step rather than subject bacteria.

### 4-3. Effects

[0311] A method for identifying bacteria of the Xanthomonas genus according to one or more embodiments of the present invention can identify whether a plant disease is caused by bacteria of the Xanthomonas genus.

[0312] Additionally, a method for identifying bacteria of the Xanthomonas genus according to one or more embodiments of the present invention can detect whether bacteria of the Xanthomonas genus exist in a lesion site of a plant that has developed a plant disease expected to be caused by the bacteria of the Xanthomonas genus.

### EXAMPLES

[0313] Examples herein correspond to Examples in Japanese Patent Application No. 2022-156882, as follows: Example 1 to Example 1, Example 2 to Example 2, Example 3 to Example 3, Example 4 to Example 4, Example 5 to Example 5, Example 6 to Example 6, Example 7 to Example 7, Example 8 to Example 8, Example 9 to Example 9, and Example 10 to Example 10, respectively. Additionally, Tables 1 to 13 herein are completely the same as Tables 1 to 13 in Japanese Patent Application No. 2022-156882. Additionally, FIGS. 1A to 11B herein are completely the same as FIGS. 1 to 11 in Japanese Patent Application No. 2022-156882. Additionally, SEQ ID NOs: 1 to 44 herein are completely the same as SEQ ID NOs: 1 to 44 in Japanese Patent Application No. 2022-156882.

### Example 1: Isolation of Novel Bacteriophage, and Bacteriolytic Ability Thereof (1)

### (Purpose)

[0314] The purpose is to isolate a novel bacteriophage having bacteriolytic ability against pathogenic bacteria of a plant disease, and verify the bacteriolytic ability against the plant pathogenic bacteria.

### (Methods and Results)

### (1) Obtainment and Culture of Plant Pathogenic Bacteria

[0315] In this Example, plant pathogenic bacteria as targets were all obtained from the National Agriculture and Food Research Organization (NARO). Each of the bacteria used in this Example are listed in Table 2, together with the deposition numbering by the National Agriculture and Food Research Organization.

TABLE 2

| | | Source of | Place of |
|---|---|---|---|
| ID | Species | Isolation | Harvest |
| MAFF No. 311019 | Xanthomonas oryzae | Rice | Gifu |
| | pv. oryzae | | |
| MAFF No. 211965 | Xanthomonas oryzae | Rice | Okinawa |
| | pv. oryzae | | |
| MAFF No. 211964 | Xanthomonas oryzae | Rice | Miyazaki |
| | pv. oryzae | | |
| MAFF No. 211191 | Xanthomonas oryzae | Rice | Miyagi |
| | pv. oryzae | | |
| MAFF No. 211971 | Xanthomonas arboricola | Peach | Yamanashi |
| | pv. pruni | | |
| MAFF No. 311351 | Xanthomonas arboricola | Peach | Fukushima |
| | pv. pruni | | |
| MAFF No. 301256 | Xanthomonas campestris | Tomato | Tokushima |
| | pv. vesicatoria | | |
| MAFF No. 301294 | Xanthomonas campestris | Pepper | Tokushima |
| | pv. vesicatoria | | |
| MAFF No. 301352 | Xanthomonas campestris | Lettuce | Wakayama |
| | pv. vitians | | |
| MAFF No. 106765 | Xanthomonas campestris | Broccoli | Ibaraki |
| | pv. campestris | | |
| MAFF No. 301078 | Xanthomonas citri | Orange | Wakayama |
| | subsp. citri | | |
| MAFF No. 673005 | Xanthomonas cucurbitae | Pumpkin | Hokkaido |
| NCIMB-ID: 10460 | Pseudomonas fluorescens | Egg | U.S.A. |

[0316] As a control, a Pseudomonas fluorescens bacterial strain (NCIMB-ID: 10460) that is reported to have a plant growth promoting action and the like, and is beneficial to the environment was obtained from NCIMB, a laboratory in The United Kingdom National Culture Collection, UKNCC.

[0317] For culturing the Xanthomonas oryzae pv. oryzae, the liquid medium (SW+P Broth) prepared by dissolving 0.5 g of monosodium L-glutamate, 1.0 g of MgCl₂·6H₂O, 0.1 g of KH₂PO₄, 5 g of sucrose, and 5 g of peptone in 1 L of H₂O and autoclaving, was used. For culturing the other bacteria of the Xanthomonas genus and bacteria of Pseudomonas fluorescens, the liquid medium (YPG Broth) prepared by dissolving 1 g of peptone, 1 g of a yeast extract, and 2 g of glucose in 1 L of H₂O and autoclaving, was used. Additionally, as an agar culture medium, agar culture medium (referred to as “SW+P Agar” when SW+P Broth was used, or as “YPG Agar” when YPG Broth was used) prepared by adding agar at 15 g per L to the above-described Broth (SW+P Broth or YPG Broth) and autoclaving, was used. Furthermore, to prepare a soft agar medium (Top Agar) to be superposed on the upper layer of the agar culture medium, agarose was added at 5 g per L to the above-described Broth, and autoclaved. The resulting Top Agar was stored at approximately 50° C., and utilized, when necessary.

[0318] Each of the above-described bacterial strains sent in a dry powder state was suspended in 0.1 mL of Broth, and then subjected to a streak culture on Agar (SW+P Agar or YPG Agar) at 25° C., and a single colony was isolated. The isolated colony was inoculated to Broth at 25° C., and subjected to a shaking culture to produce a preculture solution. In main culture, the preculture solution was inoculated to Broth, and cultured at 25° C. for 10 to 30 hours until the turbidity (Optical Density at 600 nm) reached approximately 1.0. The culture solution after the culture was directly used as bacteria suspension as it is.

### (2) Isolation and Purification of 1st Phage

[0319] A novel phage was isolated from natural dirty water or soil obtained in Japan. The method for isolating a phage was based on a conventional plaque assay method. First, dirty water from a pond, lake, or the like, or dirty water in which soil is suspended in water was filtrated through a 0.45 μm filter to prepare a phage-containing solution. Subsequently, the bacteria suspension and the phage-containing solution were mixed in equal amounts, and left at room temperature for approximately 10 minutes. Next, 0.2 mL of the bacteria/phage mixture solution was added to 3 mL of Top Agar, quickly mixed with a vortex mixer, and then poured on Agar. After the Top Agar was solidified, static culture was performed at 25° C. for approximately 12 hours. On the bacterial lawn formed by the culture, a bacteriolytic plaque was formed. Then, a chip with its end cut was used to suck gel from the plaque portion, and a phage having bacteriolytic ability against bacteria of the Xanthomonas genus was isolated. Then, the above-described procedure was repeated to purify the phage, using a phage-containing solution comprising a high concentration of the phage isolated was used instead of dirty water.

[0320] A total of three kinds of new phages were isolated from natural dirty water and soil, using a method for detecting a bacteriolytic plaque formed on a soft agar medium on which any of the above-described bacterial strains was amplified. The three kinds of novel phages isolated in Example 1 are referred to as “1st phage”.

[0321] The isolated phage was suspended in an SM Buffer, passed through a 0.2 μm filter, and collected in the form of a phage-containing solution. This phage-containing solution was mixed with the bacteria suspension under the above-described conditions to isolate a phage again. This procedure was repeated several times to further purify the phage. The composition of the SM Buffer is shown in Table 3.

TABLE 3

| SM Buffer | Final | Add to 1 L | |
|---|---|---|---|
| NaCl | 0.1M | 5.8 | g |
| Mg₂SO₄•7H₂O | 10 mM | 1 | g |
| 1M Tris-HCl PH 8.0 | 50 mM | 50 | mL |
| Gelatin | 0.1% | 0.1 | g |

### (3) Amplification and Refinement of 1st Phage

[0322] The 1st phage isolated and purified was amplified and refined by a plate lysate (PL) method that is an amplifying method using a plaque assay method. In order for many plaques to be formed on Agar, a bacteria/phage mixture solution was prepared, mixed with Top Agar, then spread on YPG Agar, and cultured. Then, 3 mL of SM Buffer was added to the Top Agar having plaques formed thereon, and shaken at 25° C. for approximately 30 minutes, and the supernatant was passed through a 0.2 μm filter to collect a collected solution containing a phage.

[0323] To refine the 1st phage, 1 g of PEG 6000 (at a final concentration of 10%) and 0.4 g of NaCl (at a final concentration of 4%) were added to and dissolved in 10 mL of the collected solution, and the resulting solution was rotated using a rotator at 4° C. overnight. Then, the supernatant was removed by centrifugation under 15,000×g at 4° C. for 60 minutes. The pellets collected were suspended in 0.5 mL of SM Buffer again. Subsequently, 0.5 mL of chloroform was added, and the resulting mixture was stirred vigorously, and left on ice for 6 hours. After centrifugation under 8,000×g at 4° C. for 10 minutes, the upper layer was collected carefully to obtain a refined solution of phage. The concentration of the refined solution of phage is commonly expressed as a titer [PFU/mL] based on the number of plaques (Plaque Forming Unit, PFU) in accordance with a plaque assay method, and serves as one index indicative of bacteriolytic ability. The titer of the refined solution of the 1st phage prepared was determined by a plaque assay method using a solution suitably diluted, and was confirmed to be 108 PFU/mL or more.

### (4) Evaluation of Host Range of 1st Phage

[0324] The host range of the 1st phage was evaluated by a spot test method. Only a bacteria suspension in an amount of 0.1 mL was added to and mixed with 3 mL of Top Agar, then poured onto Agar, spread on the whole plate, and solidified. Bacteria suspensions were the bacteria suspensions prepared in (1) above from the bacteria of the Xanthomonas genus shown in Table 1 as well as a bacteria suspension prepared as a control from Pseudomonas fluorescens. Then, approximately 5 μL of the refined solution of phage was dropped, and subjected to a static culture at 25° C. for approximately 12 hours. When the solution became clear in circular shape (approximately 1 cm in diameter) at the site of dropping on the plate having the bacterial lawn formed thereon, it was determined that the phage dropped had bacteriolytic ability against the bacterial strain.

[0325] One example of the results is shown in FIGS. 1A-1B. When the 1st phage exhibited bacteriolytic ability, only the site where the refined solution of phage was dropped became clear in the bacterial lawn formed on the plate. The three kinds of 1st phages obtained in one or more embodiments of the present invention exhibited bacteriolytic ability against the bacterial strains belonging to all five species of bacteria: Xanthomonas arboricola, Xanthomonas campestris, Xanthomonas citri, Xanthomonas oryzae, and Xanthomonas cucurbitae, which are shown in Table 2. On the other hand, it has also been verified that the phages do not exhibit bacteriolytic ability against Pseudomonas fluorescens. There is an example of a report that a phage exhibits the ability against two or more species of bacteria of the Xanthomonas genus, but such a pattern as described above has not been reported (Nakayinga R. et al., BMC Microbiology, 2021, 21:291).

[0326] FIG. 12 shows one example of a plate in a plaque assay performed on the 1st phage having the nucleotide sequence of SEQ ID NO: 8, using Xanthomonas oryzae pv. oryzae with the ID of MAFF No. 311019 as bacteria species. As a result of bacteriolysis, many plaques were formed, thus revealing that the 1st phage exhibited bacteriolytic ability against this bacteria isolated from a rice plant. These results suggest the possibility that the 1st phage can be applied to various plant diseases. For example, this suggests the usefulness for control of shot hole disease of Prunus spp., rice leaf blight, orange bacterial canker, black rot disease of broccoli, and the like, which are caused by bacteria of the Xanthomonas genus, and is expected to be very valuable in industrial uses.

### (5) Genomic Analysis of 1st Phage

[0327] The genomic DNA sequence of the 1st phage was determined and analyzed.

### (i) Preparation and Sequencing of Genomic DNA of 1st Phage

[0328] The genome of the 1st phage was extracted using a TURBO DNA-free™ kit (Thermo Fisher Scientific Inc.). Host bacteria-derived genomic DNAs, which become contaminants, were removed by a treatment according to the manual attached to the kit. Then, using NucleoSpin® Virus (Machery-Nagel & Co. KG), the outer-shell molecules of the phage were decomposed by a Proteinase K treatment according to the attached manual. Via refining the genomic DNA using a silica spin column, a genomic DNA solution of the 1st phage was prepared. Then, the concentration of the genomic DNA was measured using a Qubit dsDNA HS Assay kit (Thermo Fisher Scientific Inc.), and 50 μL of the genomic DNA solution was prepared at a final concentration of 0.2 ng/μL. Subsequently, by a treatment with Nextera XT DNA Library Prep (Illumina, Inc.) and according to the attached manual, the genome of the 1st phage was fragmented, and an adapter sequence was added by PCR. Next, Agilent High Sensitivity DNA Kit (Agilent Technologies, Inc.) was used for electrophoresis with Bioanalyzer (Agilent Technologies, Inc.) to measure the average bp size of the sample, and determine the concentration of the DNA fragments. Lastly, using a Miseq Reagent kit (Illumina, Inc.), a sample for measurement was prepared by a treatment according to the attached manual, and a measurement was made using a next-generation sequencer Miseq (Illumina, Inc.). Utilizing a CLC genomics workbench (Qiagen N. V.), the data obtained was pretreated (for example, trimmed), and then subjected to a de novo assembly to obtain the contig sequence corresponding to the genomic sequence of the phage.

### (ii) Bioinformatics Analysis Based on Genomic Sequence Information

[0329] The genomic nucleotide sequences (SEQ ID NOs: 8 to 10) of the 1st phages were analyzed by BLAST with GENETYX-NGS packaged in GENETYX, consequently revealing that the nucleotide sequences of SEQ ID NOs: 8 to 10 had a high sequence identity to each other. For example, the sequence identity (the average nucleotide identity (ANI)) of the nucleotide sequence of SEQ ID NO: 8 to the nucleotide sequence of SEQ ID NO: 9 was 98% or more over the range of 96% or more of the full length, and the sequence identity of the nucleotide sequence of SEQ ID NO: 8 to the nucleotide sequence of SEQ ID NO: 10 was 98% or more over the range of 95% or more of the full length.

[0330] Furthermore, the genomic sequence information on the above-described three kinds of phages was searched for tail fiber genes. The RAST server (https://rast.nmpdr.org/) and PHASTER (https://phaster.ca/) were searched for tail fiber genes, resulting in identifying, from the genomic sequences of the respective phages, the nucleotide sequences of SEQ ID NOs: 5 to 7 were estimated to be tail fiber genes. The nucleotide sequences of SEQ ID NOs: 5 to 7 were analyzed with GENETYX, consequently revealing that the nucleotide sequences of SEQ ID NOs: 5 to 7 had a high sequence identity to each other, for example, the sequence identity of the nucleotide sequence of SEQ ID NO: 5 to the nucleotide sequence of each of SEQ ID NOS: 6 and 7 was 96% or more, and a sequence identity between the nucleotide sequences of SEQ ID NOs: 6 and 7 was 98% or more. Additionally, the amino acid sequences (SEQ ID NOs: 2 to 4) encoded by the nucleotide sequences of SEQ ID NOs: 5 to 7 were analyzed with GENETYX, consequently revealing that the amino acid sequences of SEQ ID NOs: 2 to 4 had a high sequence identity to each other, and a sequence identity between the amino acid sequences of SEQ ID NOs: 2 to 4 was 98% or more.

[0331] On the basis of the genomic nucleotide sequences (SEQ ID NOs: 8 to 10) of the above-described phages, and using the NCBI-provided BLAST server (https://blast.ncbi.nlm.nih.gov/Blast.cgi), similar DNA sequences were searched for, and the sequence identities were verified. As a result of the search, the genomic sequence of a phage Mija described in the U.S. Patent Application Publication No. 2016/0309723 (SEQ ID NO: 29 in the publication) had the highest analogous score, for example, a sequence identity thereof to the genomic nucleotide sequence of SEQ ID NO: 8 was 86.5% over the range of 93% of the full length.

[0332] The bacteriolytic ability of the phage Mija was verified to Xylella fastidiosa and the like, and the host range of the phage Mija is different from the host range of the phage of one or more embodiments of the present invention. Generally, it is considered that the characteristics related to the host specificity and host range of a phage depend largely on the role of a tail fiber protein (Nobrega F. L. et al., Nat. Rev. Microbiol., 2018, 16:760-773), and the present inventors consider that the above-described difference in the host range is caused by a difference in the tail fiber gene.

[0333] Accordingly, the nucleotide sequences (SEQ ID NOs: 5 to 7) of the tail fiber genes identified were used as a query to search the genomic sequence of the phage Mija for a similar DNA sequence. Consequently, only region found in the genomic sequence of the phage Mija was a region having a sequence identity of 83% to the nucleotide sequence of SEQ ID NO: 5 over the range as small as 16% of the full length, and a DNA sequence homologous to the nucleotide sequences of SEQ ID NOs: 5 to 7 over the full length was not found. This result has revealed that the difference in the host range between the phage Mija and the three kinds of phages obtained in Examples herein is due to the difference in the tail fiber gene.

[0334] To examine whether the tail fiber gene of a phage of one or more embodiments of the present invention is novel, the amino acid sequences of SEQ ID NOs: 2 to 4 were used as a query to search the NCBI-provided BLAST server for a similar amino acid sequence. Consequently, the tail fiber protein (GenBank Accession No.: AMQ65898.1) of Stenotrophomonas phage vB_SmaS-DLP_6 had the highest analogous score. However, a sequence identity of the amino acid sequence to each of the amino acid sequences of SEQ ID NOs: 2 to 4 was low, and for example, a sequence identity was only 58.47% to the sequence of SEQ ID NO: 2 over the range as small as 35% of the full length. In this connection, Stenotrophomonas phage vB_SmaS-DLP_6 targets the Stenotrophomonas genus, i.e., targets bacteria different in the genus from the phage of one or more embodiments of the present invention.

[0335] The above-described results have revealed that a phage in one or more embodiments of the present invention has a conventionally unreported novel host range in the Xanthomonas genus, and that the characteristics of the phage rely on the novel tail fiber gene in particular.

### Example 2: Isolation of Novel Bacteriophage, and Bacteriolytic Ability Thereof (2)

### (Purpose)

[0336] The purpose is to isolate a novel bacteriophage having bacteriolytic ability against pathogenic bacteria of a plant disease, and verify the bacteriolytic ability against the plant pathogenic bacteria.

### (Methods and Results)

### (1) Obtainment and Culture of Plant Pathogenic Bacteria

[0337] In this Example, the plant pathogenic bacteria as target bacteria were bacteria of the Xanthomonas genus, and all the bacterial strains were obtained from the National Agriculture and Food Research Organization (NARO). Each of the bacteria used in Example 2 is listed in Table 4, together with the deposition numbering (MAFF No.) by the National Agriculture and Food Research Organization.

TABLE 4

| | | Source of | Place of |
|---|---|---|---|
| ID | Species | Isolation | Harvest |
| MAFF No. 311019 | Xanthomonas oryzae | Rice | Gifu |
| | pv. oryzae | | |
| MAFF No. 211965 | Xanthomonas oryzae | Rice | Okinawa |
| | pv. oryzae | | |
| MAFF No. 211964 | Xanthomonas oryzae | Rice | Miyazaki |
| | pv. oryzae | | |
| MAFF No. 211191 | Xanthomonas oryzae | Rice | Miyagi |
| | pv. oryzae | | |
| MAFF No. 211971 | Xanthomonas arboricola | Peach | Yamanashi |
| | pv. pruni | | |
| MAFF No. 311351 | Xanthomonas arboricola | Peach | Fukushima |
| | pv. pruni | | |
| MAFF No. 212146 | Xanthomonas arboricola | Walnut | Nagano |
| | pv. juglandis | | |
| MAFF No. 301256 | Xanthomonas campestris | Tomato | Tokushima |
| | pv. vesicatoria | | |
| MAFF No. 301294 | Xanthomonas campestris | Pepper | Tokushima |
| | pv. vesicatoria | | |
| MAFF No. 301352 | Xanthomonas campestris | Lettuce | Wakayama |
| | pv. vitians | | |
| MAFF No. 301078 | Xanthomonas citri | Orange | Wakayama |
| | subsp. citri | | |
| MAFF No. 673005 | Xanthomonas cucurbitae | Pumpkin | Hokkaido |
| NCIMB-ID: 10460 | Pseudomonas fluorescens | Egg | U.S.A. |

[0338] Additionally, as a control, a Pseudomonas fluorescens bacterial strain (NCIMB-ID: 10460), which is of Pseudomonas genus, was obtained from NCIMB, a laboratory in The United Kingdom National Culture Collection, UKNCC.

[0339] Bacteria of the Xanthomonas genus and Pseudomonas fluorescens were cultured in accordance with the method described in “(1) Obtainment and Culture of Plant Pathogenic Bacteria” in Example 1.

### (2) Isolation and Purification of 2nd Phage

[0340] A novel phage was isolated from natural dirty water or soil obtained in Japan. A method for isolation and a method for purification were in accordance with the methods described in “(2) Isolation and Purification of 1st Phage” in Example 1. Consequently, one kind of new phage was isolated from natural dirty water and soil. This novel phage isolated in Example 2 is referred to as a “2nd phage”.

[0341] The isolated phage was suspended in an SM Buffer, passed through a 0.2 μm filter, and collected in the form of a phage-containing solution. This phage-containing solution was mixed with the bacteria suspension under the above-described conditions to isolate a phage again. This procedure was repeated several times to purify the phage.

### (3) Amplification and Refinement of 2nd Phage

[0342] The 2nd phage, isolated and purified, was amplified and refined by the plate lysate (PL) method. Specific method was in accordance with the method described in “(3) Amplification and Refinement of 1st Phage” in Example 1. The titer of the refined solution of the 2nd phage prepared was determined by a plaque assay method using a solution suitably diluted, and was confirmed to be 108 PFU/mL or more.

### (4) Evaluation of Host Range of 2nd Phage

[0343] The host range of the 2nd phage was evaluated by the spot test method. The basic operation was in accordance with the method described in “(4) Evaluation of Host Range of 1st Phage” in Example 1.

[0344] One example of the results is shown in FIGS. 2A-2B. When the 2nd phage exhibited bacteriolytic ability, only the site where the refined solution of phage was dropped became clear in the bacterial lawn formed on the plate. The 2nd phage obtained in one or more embodiments of the present invention exhibited bacteriolytic ability against all the bacteria of the Xanthomonas genus shown in Table 4. On the other hand, the phage did not exhibit bacteriolytic ability against Pseudomonas fluorescens. As with Example 1, a phage that exhibits bacteriolytic ability against each of the diverse bacterial species, such as shown in Table 4, has not been known hitherto.

[0345] FIG. 13 shows one example of a plate in a plaque assay performed on the 2nd phage, using Xanthomonas oryzae pv. oryzae with the ID of MAFF No. 311019 as a bacterial species. As a result of bacteriolysis, many plaques were formed, thus revealing that the 2nd phage exhibited bacteriolytic ability against this bacteria isolated from a rice plant. These results suggest that the 2nd phage isolated exhibited bacteriolytic ability against a wide range of bacteria of the Xanthomonas genus.

[0346] Additionally, these results suggest that the 2nd phage is useful for control of shot hole disease of Prunus spp., rice leaf blight, orange bacterial canker, black rot disease of broccoli, and the like, which are caused by bacteria of the Xanthomonas genus.

### (5) Genomic Analysis of 2nd Phage

[0347] The genomic DNA sequence of the 2nd phage was determined and analyzed.

### (i) Preparation and Sequencing of Genomic DNA of 2nd Phage

[0348] The genome of the 2nd phage was extracted using a TURBO DNA-free™ kit (Thermo Fisher Scientific Inc.). The basic operation was in accordance with the method described in “(5) Genomic Analysis of 1st Phage, (i) Preparation and Sequencing of Genomic DNA of 1st Phage” in Example 1.

### (ii) Bioinformatics Analysis Based on Genomic Sequence Information

[0349] On the basis of the genomic nucleotide sequence (SEQ ID NO: 13) of the phage obtained in (i) above, and using the NCBI-provided BLAST server (the same as the above), similar DNA sequences were searched for, and the sequence identities were verified. As a result of the search, the genomic sequence of a phage (the access code: MT664984.1) that targets bacteria of the Xanthomonas genus, the bacteria called Xp12, had the highest analogous score, with a sequence identity of 98.42%. However, the only known bacterial species against which the phage Xp12 exhibits bacteriolytic ability is Xanthomonas oryzae (Nakayinga R. et al., BMC Microbiology, 2021, 21:291).

[0350] To clarify the cause of the difference in host specificity between Xp12 and the 2nd phage isolated in this Example, the sequences of the tail fiber proteins of both phages were compared.

[0351] First, a tail fiber gene was identified from the genomic sequence of the 2nd phage in this Example. The gene was identified utilizing a RAST server (https://rast.nmpdr.org/) and a PHASTER server (https://phaster.ca/). Consequently, the nucleotide sequence of SEQ ID NO: 12 was identified as the tail fiber gene.

[0352] Furthermore, the amino acid sequence (SEQ ID NO: 11) encoded by the gene consisting of the nucleotide sequence of SEQ ID NO: 12 was compared with the amino acid sequence (the access code: QNN97189.1) of the analogous protein of Xp12, revealing that the kind of amino acid was different at position 278 and position 350. Specifically, valine at position 278 in Xp12 was changed to alanine, and serine at position 350 was changed to tryptophan. These are not conservative substitutions, and serine in particular often contributes to the protein-protein interaction, suggesting a high possibility that these substitutions cause a difference in the function.

[0353] From the above-described results, it has been estimated that the 2nd phage has a conventionally unreported novel host range in the Xanthomonas genus, and that the characteristics of the phage rely on the tail fiber gene.

### Example 3: Isolation of Novel Bacteriophage, and Bacteriolytic Ability Thereof (3)

### (Purpose)

[0354] The purpose is to isolate a novel bacteriophage having bacteriolytic ability against pathogenic bacteria of a plant disease, and verify the bacteriolytic ability against the plant pathogenic bacteria.

### (Methods and Results)

[0355] (1) Obtainment and Culture of Plant Pathogenic Bacteria

[0356] In this Example, the plant pathogenic bacteria were bacteria of the Xanthomonas genus, and all the bacterial strains were obtained from the National Agriculture and Food Research Organization (NARO). Each of the bacteria used in this Example is listed in Table 5, together with the deposition numbering (MAFF No.) by the National Agriculture and Food Research Organization.

TABLE 5

| | | Source of | Place of |
|---|---|---|---|
| ID | Species | Isolation | Harvest |
| MAFF No. 311282 | Xanthomonas arboricola | Peach | Fukushima |
| | pv. pruni | | |
| MAFF No. 301426 | Xanthomonas arboricola | Peach | Fukushima |
| | pv. pruni | | |
| MAFF No. 311351 | Xanthomonas arboricola | Peach | Fukushima |
| | pv. pruni | | |
| MAFF No. 311586 | Xanthomonas arboricola | Peach | Nagano |
| | pv. pruni | | |
| MAFF No. 311618 | Xanthomonas arboricola | Peach | Wakayama |
| | pv. pruni | | |
| NCIMB-ID: 10460 | Pseudomonas fluorescens | Egg | U.S.A. |

[0357] As a control, a Pseudomonas fluorescens bacterial strain (NCIMB-ID: 10460), which is a of Pseudomonas genus, was obtained from NCIMB, a laboratory in The United Kingdom National Culture Collection, UKNCC.

[0358] Bacteria of the Xanthomonas genus and Pseudomonas fluorescens were cultured in accordance with the method described in “(1) Obtainment and Culture of Plant Pathogenic Bacteria” in Example 1.

### (2) Isolation and Purification of 3rd Phage

[0359] A novel phage was isolated from natural dirty water or soil obtained in Japan. A method for isolation and a method for purification were in accordance with the methods described in “(2) Isolation and Purification of 1st Phage” in Example 1. Consequently, one kind of new phage was isolated from natural dirty water and soil. This novel phage isolated in Example 3 is referred to as a “3rd phage”.

[0360] The isolated phage was suspended in an SM Buffer, passed through a 0.2 μm filter, and collected in the form of a phage-containing solution. This phage-containing solution was mixed with the bacteria suspension under the above-described conditions to isolate a phage again. This procedure was repeated several times to purify the phage.

### (3) Amplification and Refinement of 3rd Phage

[0361] The 3rd phage, isolated and purified, was amplified and refined by the plate lysate (PL) method. Specific method was in accordance with the method described in “(3) Amplification and Refinement of 1st Phage” in Example 1. The titer of the refined solution of the 3rd phage prepared was determined by a plaque assay method using a solution suitably diluted, and was confirmed to be 108 PFU/mL or more.

### (4) Evaluation of Host Range of 3rd Phage

[0362] The host range of the 3rd phage was evaluated by the spot test method. The basic operation was in accordance with the method described in “(4) Evaluation of Host Range of 1st Phage” in Example 1.

[0363] One example of the results is shown in FIGS. 3A-3B. When the 3rd phage exhibited bacteriolytic ability, only the site where the refined solution of phage was dropped became clear in the bacterial lawn formed on the plate. The 3rd phage obtained in one or more embodiments of the present invention exhibited bacteriolytic ability against all the bacteria of the Xanthomonas genus shown in Table 5. On the other hand, the phage did not exhibit bacteriolytic ability against Pseudomonas fluorescens. Generally, the host range of a phage is known to be limited to a local specific strain of a specific bacterial species (Sharma S. et al., Folia Microbiol., 2017, 62:17-55; Nakayinga R. et al., BMC Microbiology, 2021, 21:291). As shown by the places of harvest in Table 5, however, the phage isolated in this Example exhibited bacteriolytic ability against each of the bacteria of the Xanthomonas genus separated in different places. This suggests that the 3rd phage isolated exhibited bacteriolytic ability against a wide range of bacteria of the Xanthomonas genus.

[0364] Additionally, these results suggest that the 3rd phage is useful for control of shot hole disease of Prunus spp., which is caused by bacteria of the Xanthomonas genus.

### (5) Genomic Analysis of 3rd Phage

[0365] The genomic DNA sequence of the 3rd phage was determined and analyzed.

### (i) Preparation and Sequencing of Genomic DNA of 3rd Phage

[0366] The genome of the 3rd phage was extracted using a TURBO DNA-free™ kit (Thermo Fisher Scientific Inc.). The basic operation was in accordance with the method described in “(5) Genomic Analysis of 1st Phage, (i) Preparation and Sequencing of Genomic DNA of 1st Phage” in Example 1.

### (ii) Bioinformatics Analysis Based on Genomic Sequence Information

[0367] On the basis of the genomic nucleotide sequence (SEQ ID NO: 14) of the 3rd phage obtained in (i) above, and using the NCBI-provided BLAST server (the same as the above), similar DNA sequences were searched for, and the sequence identities were verified. As a result of the search, several kinds of Pseudomonas phage complete genomes (the access codes: KX129925.1, MN504636.1, KX898399.1, NC_041953.1, and MW835180.1) had the highest analogous score. However, all of the sequences only had a sequence identity of approximately 75% over the very small range of from 6% to 7% of the full length of the genome. Moreover, for these phages, the host bacteria are different from bacteria of the Xanthomonas genus. This result suggests that the 3rd phage is a phage having a novel genomic sequence, the analogous genomic sequence of which is not known at all.

### Example 4: Isolation of Novel Bacteriophage, and Bacteriolytic Ability Thereof (4)

### (Purpose)

[0368] The purpose is to isolate a novel bacteriophage having bacteriolytic ability against pathogenic bacteria of a plant disease, and verify the bacteriolytic ability against the plant pathogenic bacteria.

### (Materials and Method)

### (1) Obtainment and Culture of Plant Pathogenic Bacteria

[0369] In this Example, the plant pathogenic bacteria as target bacteria were bacteria of the Xanthomonas genus, and all the bacterial strains were obtained from the National Agriculture and Food Research Organization (NARO). Each of the bacteria used in this Example is listed in Table 6, together with the deposition numbering (MAFF No.) by the National Agriculture and Food Research Organization.

TABLE 6

| | | Source of | Place of |
|---|---|---|---|
| ID | Species | Isolation | Harvest |
| MAFF No. 311282 | Xanthomonas arboricola | Peach | Fukushima |
| | pv. pruni | | |
| MAFF No. 311351 | Xanthomonas arboricola | Peach | Fukushima |
| | pv. pruni | | |
| MAFF No. 311417 | Xanthomonas arboricola | Peach | Fukushima |
| | pv. pruni | | |
| MAFF No. 311579 | Xanthomonas arboricola | Peach | Fukushima |
| | pv. pruni | | |
| MAFF No. 311584 | Xanthomonas arboricola | Peach | Fukushima |
| | pv. pruni | | |
| MAFF No. 311586 | Xanthomonas arboricola | Peach | Nagano |
| | pv. pruni | | |
| MAFF No. 311618 | Xanthomonas arboricola | Peach | Wakayama |
| | pv. pruni | | |
| MAFF No. 311641 | Xanthomonas arboricola | Peach | Fukushima |
| | pv. pruni | | |
| NCIMB-ID: 10460 | Pseudomonas fluorescens | Egg | U.S.A. |

[0370] As a control, a Pseudomonas fluorescens bacterial strain (NCIMB-ID: 10460), which is of Pseudomonas genus, was obtained from NCIMB, a laboratory in The United Kingdom National Culture Collection, UKNCC.

[0371] Bacteria of the Xanthomonas genus and Pseudomonas fluorescens were cultured in accordance with the method described in “(1) Obtainment and Culture of Plant Pathogenic Bacteria” in Example 1.

### (2) Isolation and Purification of 4th Phage

[0372] A novel phage was isolated from natural dirty water or soil obtained in Japan. A method for isolation and a method for purification were in accordance with the methods described in “(2) Isolation and Purification of 1st Phage” in Example 1. Consequently, one kind of new phage was isolated from natural dirty water and soil. This novel phage isolated in Example 4 is referred to as a “4th phage”.

[0373] The isolated phage was suspended in an SM Buffer, passed through a 0.2 μm filter, and collected in the form of a phage-containing solution. This phage-containing solution was mixed with the bacteria suspension under the above-described conditions to isolate a phage again. This procedure was repeated several times to purify the phage.

### (3) Amplification and Refinement of 4th Phage

[0374] The 4th phage isolated and purified was amplified and refined by the plate lysate (PL) method that is an amplifying method using a plaque assay method. Specific method was in accordance with the method described in “(3) Amplification and Refinement of 1st Phage” in Example 1. The titer of the refined solution of the 4th phage prepared was determined by a plaque assay method using a solution suitably diluted, and was confirmed to be 108 PFU/mL or more.

### (4) Evaluation of Host Range of 4th Phage

[0375] The host range of the 4th phage was evaluated by the spot test method. The basic operation was in accordance with the method described in “(4) Evaluation of Host Range of 1st Phage” in Example 1. One example of the results is shown in FIGS. 4A-4B. When the 4th phage exhibited bacteriolytic ability, only the site where the refined solution of phage was dropped became clear in the bacterial lawn formed on the plate. The 4th phage obtained in one or more embodiments of the present invention exhibited bacteriolytic ability against all bacterial strains of the bacteria of the Xanthomonas genus shown in Table 6. As with Example 3, the phage exhibited bacteriolytic ability against each of the bacteria of the Xanthomonas genus separated in different places. This suggests that the isolated phage exhibited bacteriolytic ability against a wide range of bacteria of the Xanthomonas genus.

[0376] Additionally, these results suggest that the 4th phage is useful for control of shot hole disease of Prunus spp., which is caused by bacteria of the Xanthomonas genus.

### (5) Genomic Analysis of 4th Phage

[0377] The genomic DNA sequence of the 4th phage was determined and analyzed.

### (i) Preparation and Sequencing of Genomic DNA of 4th Phage

[0378] The genome of the phage was extracted using a TURBO DNA-free™ kit (Thermo Fisher Scientific Inc.). The basic operation was in accordance with the method described in “(5) Genomic Analysis of 1st Phage, (i) Preparation and Sequencing of Genomic DNA of 1st Phage” in Example 1.

(ii) Bioinformatics Analysis based on Genomic Sequence Information

[0379] On the basis of the genomic nucleotide sequence (SEQ ID NO: 17) of the phage obtained in (i) above, and using the NCBI-provided BLAST server (the same as the above), similar DNA sequences were searched for, and the sequence identities were verified. As a result of the search, several phages separated in Belgium and designated as FoX as described in Nakayinga (Nakayinga R. et al., BMC Microbiology, 2021, 21:291) (the access codes: NC_055835.1, NC_055836.1, NC_055837.1, and NC_055838.1) had the highest analogous score. However, all of the sequences only had a sequence identity as small as approximately 77% over the range of 10% of the full length. This result suggests that the phage isolated in Example 1 is a phage having a novel genomic sequence, the analogous sequence of which has basically not been reported.

[0380] Generally, it is considered that the characteristics related to the host specificity and host range of a phage depend largely on the role of a tail fiber protein (Nobrega F. L. et al., Nat. Rev. Microbiol., 2018, 16:760-773). Accordingly, the genomic sequence information on the 4th phage was searched for tail fiber genes. Utilizing the RAST server (https://rast.nmpdr.org/) and PHASTER (https://phaster.ca/), the nucleotide sequence of SEQ ID NO: 16 was identified as an estimated tail fiber gene from the genomic sequence of the 4th phage. This gene sequence had a nucleotide sequence identity of 58% to the tail fiber gene of a known phage Fox. The host bacterial species reported for the phage Fox is Xanthomonas campestris (Nakayinga R. et al., BMC Microbiology, 2021, 21:291). Accordingly, it has a different host range from the 4th phage.

[0381] Additionally, this result suggests that it is difficult to predict the host range of a phage having a tail fiber gene of a different nucleotide sequence, on the basis of the relationship between information on a known tail fiber gene and information on the host bacterial species of a phage having the gene.

[0382] From the above-described results, it has been estimated that the 4th phage has a conventionally unreported novel host range in the Xanthomonas genus, and that the characteristics of the phage rely on the novel tail fiber gene in particular.

### Example 5: Isolation of Novel Bacteriophage, and Bacteriolytic Ability Thereof (5)

### (Purpose)

[0383] The purpose is to isolate a novel bacteriophage having bacteriolytic ability against pathogenic bacteria of a plant disease, and verify the bacteriolytic ability against the plant pathogenic bacteria.

### (Methods and Results)

### (1) Obtainment and Culture of Plant Pathogenic Bacteria

[0384] In this Example, the plant pathogenic bacteria as target bacteria were bacteria of the Xanthomonas genus, and all the bacterial strains were obtained from the National Agriculture and Food Research Organization (NARO). Each of the bacteria used in this Example is listed in Table 7, together with the deposition numbering (MAFF No.) by the National Agriculture and Food Research Organization.

TABLE 7

| | | Source of | Place of |
|---|---|---|---|
| ID. | Species | Isolation | Harvest |
| MAFF No. 211971 | Xanthomonas arboricola | Peach | Yamanashi |
| | pv. pruni | | |
| MAFF No. 311351 | Xanthomonas arboricola | Peach | Fukushima |
| | pv. pruni | | |
| MAFF No. 311622 | Xanthomonas arboricola | Peach | Yamanashi |
| | pv. pruni | | |
| NCIMB-ID: 10460 | Pseudomonas fluorescens | Egg | U.S.A. |

[0385] As a control, a Pseudomonas fluorescens bacterial strain (NCIMB-ID: 10460), which is of Pseudomonas genus, was obtained from NCIMB, a laboratory in The United Kingdom National Culture Collection, UKNCC.

[0386] Bacteria of the Xanthomonas genus and Pseudomonas fluorescens were cultured in accordance with the method described in “(1) Obtainment and Culture of Plant Pathogenic Bacteria” in Example 1.

### (2) Isolation and Purification of 5th Phage

[0387] A novel phage was isolated from natural dirty water or soil obtained in Japan. A method for isolation and a method for purification were in accordance with the methods described in “(2) Isolation and Purification of 1st Phage” in Example 1. Consequently, two kinds of new phages were isolated from natural dirty water and soil. These novel phages isolated in Example 5 are referred to as a “5th phage”.

[0388] The isolated phage was suspended in an SM Buffer, passed through a 0.2 μm filter, and collected in the form of a phage-containing solution. This phage-containing solution was mixed with the bacteria suspension under the above-described conditions to isolate a phage again. This procedure was repeated several times to purify the phage.

### (3) Amplification and Refinement of 5th Phage

[0389] The 5th phage isolated and purified was amplified and refined by the plate lysate (PL) method. Specific method was in accordance with the method described in “(3) Amplification and Refinement of 1st Phage” in Example 1. The titer of the refined solution of the 5th phage prepared was determined by a plaque assay method using a solution suitably diluted, and was confirmed to be 108 PFU/mL or more.

### (4) Evaluation of Host Range of 5th Phage

[0390] The host range of the 5th phage was evaluated by the spot test method. The basic operation was in accordance with the method described in “(4) Evaluation of Host Range of 1st Phage” in Example 1.

[0391] One example of the results is shown in FIGS. 5A-5B. When the 5th phage exhibited bacteriolytic ability, only the site where the refined solution of phage was dropped became clear in the bacterial lawn formed on the plate. The 5th phage obtained in one or more embodiments of the present invention exhibited bacteriolytic ability against all the bacteria of the Xanthomonas genus shown in Table 7. On the other hand, the phage did not exhibit bacteriolytic ability against Pseudomonas fluorescens. As with Example 3, the phage exhibited bacteriolytic ability against each of the bacteria of the Xanthomonas genus separated in different places. This suggests that the 5th phage isolated exhibited bacteriolytic ability against a wide range of bacteria of the Xanthomonas genus.

[0392] Additionally, these results suggest that the 5th phage is useful for control of shot hole disease of Prunus spp., which is caused by bacteria of the Xanthomonas genus.

### (5) Genomic Analysis of 5th Phage

[0393] The genomic DNA sequence of the 5th phage was determined and analyzed.

### (i) Preparation and Sequencing of Genomic DNA of 5th Phage

[0394] The genome of the 5th phage was extracted using a TURBO DNA-free™ kit (Thermo Fisher Scientific Inc.). The basic operation was in accordance with the method described in “(5) Genomic Analysis of 1st Phage, (i) Preparation and Sequencing of Genomic DNA of 1st Phage” in Example 1.

(ii) Bioinformatics Analysis based on Genomic Sequence Information

[0395] On the basis of the genomic nucleotide sequences (SEQ ID NOs: 18 and 19) of the 5th phage obtained in (i) above, and using the NCBI-provided BLAST server (the same as the above), similar DNA sequences were searched for, and the sequence identities were verified. The search resulted in many hits for the related sequences. Over the range of 90% or more of the full length, the sequence having the highest value of sequence identity to SEQ ID NO: 18 was Pseudomonas phage vB_PaeS (the access code: LC552830.1), and the sequence having the highest sequence identity to SEQ ID NO: 19 was P1940 (the access code: MX298177.1), as described in the U.S. Patent Application Publication No. 2017-0319637. Each sequence exhibited the same degree of sequence identity to both of SEQ ID NOs: 18 and 19, as shown in Table 8 below.

TABLE 8

| | | SEQ ID No. 18 | | SEQ ID No. 19 | |
|---|---|---|---|---|---|
| | | Query | | Query | |
| | Access Code | Cover | Identity | Cover | Identity |
| vB_PaeS | LC552830.1 | 90% | 98.28% | 87% | 98.05% |
| P1940 | MX298177.1 | 92% | 97.45% | 94% | 98.61% |

[0396] In the Table, the sequence identity is a value for the range automatically aligned by an analysis server with respect to the genomic full length of SEQ ID NO: 18 or 19. The range is shown as the value of Query Cover. For example, the sequence identity of 98.28% for vB_PaeS is a value calculated over the region limited to 90% of the full length of SEQ ID NO:

[0397] 18. Accordingly, the sequence identity to the full length is estimated, although it is difficult to be calculated, to be at least a value lower than 98.28% and to correspond to a value lower than 90%. In the case of P1940, the sequence identity is estimated to correspond to a value lower than 95%.

[0398] The result of this analysis has revealed that the target bacteria of a phage having the genome of the above-described known sequence are bacteria of Pseudomonas genus. Accordingly, the 5th phage in this Example had an extremely high sequence identity to the genomic sequence of a known phage, but it was difficult to identify the target bacteria of the 5th phage. Simultaneously, it is highly plausible that a phage having a higher sequence identity to the 5th phage over a wider range than vB_PaeS and P1940 has the same host range, i.e., bacteria of the Xanthomonas genus, as for the 5th phage in this Example.

[0399] From the above-described results, it has been estimated that the 5th phage has a conventionally unreported novel host range in the Xanthomonas genus.

### Example 6: Isolation of Novel Bacteriophage, and Bacteriolytic Ability Thereof (6)

### (Purpose)

[0400] The purpose is to isolate a novel bacteriophage having bacteriolytic ability against pathogenic bacteria of a plant disease, and verify the bacteriolytic ability against the plant pathogenic bacteria.

### (Method and Results)

### (1) Obtainment and Culture of Plant Pathogenic Bacteria

[0401] In one or more embodiments of the present invention, the plant pathogenic bacteria as target bacteria were bacteria of the Xanthomonas genus, and all the bacterial strains were obtained from the National Agriculture and Food Research Organization (NARO). Each of the bacteria used in this Example is listed in Table 9, together with the deposition numbering (MAFF No.) by the National Agriculture and Food Research Organization.

TABLE 9

| | | Source of | Place of |
|---|---|---|---|
| ID | Species | Isolation | Harvest |
| MAFF No. 211971 | Xanthomonas arboricola | Peach | Yamanashi |
| | pv. pruni | | |
| MAFF No. 311351 | Xanthomonas arboricola | Peach | Fukushima |
| | pv. pruni | | |
| MAFF No. 311622 | Xanthomonas arboricola | Peach | Yamanashi |
| | pv. pruni | | |
| NCIMB-ID: 10460 | Pseudomonas fluorescens | Egg | U.S.A. |

[0402] As a control, a Pseudomonas fluorescens bacterial strain (NCIMB-ID: 10460), which is of Pseudomonas genus, was obtained from NCIMB, a laboratory in The United Kingdom National Culture Collection, UKNCC.

[0403] Bacteria of the Xanthomonas genus and Pseudomonas fluorescens were cultured in accordance with the method described in “(1) Obtainment and Culture of Plant Pathogenic Bacteria” in Example 1.

### (2) Isolation and Purification of 6th Phage

[0404] A novel phage was isolated from natural dirty water or soil obtained in Japan. A method for isolation and a method for purification were in accordance with the methods described in “(2) Isolation and Purification of 1st Phage” in Example 1. Consequently, one kind of new phage was isolated from natural dirty water and soil. This novel phage isolated in Example 6 is referred to as a “6th phage”.

[0405] The isolated phage was suspended in an SM Buffer, passed through a 0.2 μm filter, and collected in the form of a phage-containing solution. This phage-containing solution was mixed with the bacteria suspension under the above-described conditions to isolate a phage again. This procedure was repeated several times to purify the phage.

### (3) Amplification and Refinement of 6th Phage

[0406] The 6th phage isolated and purified was amplified and refined by the plate lysate (PL) method. Specific method was in accordance with the method described in “(3) Amplification and Refinement of 1st Phage” in Example 1. The titer of the refined solution of the 6th phage prepared was determined by a plaque assay method using a solution suitably diluted, and was confirmed to be 108 PFU/mL or more.

### (4) Evaluation of Host Range of 6th Phage

[0407] The host range of the 6th phage was evaluated by the spot test method. The basic operation was in accordance with the method described in “(4) Evaluation of Host Range of 1st Phage” in Example 1.

[0408] One example of the results is shown in FIGS. 6A-6B. When the 6th phage exhibited bacteriolytic ability, only the site where the refined solution of phage was dropped became clear in the bacterial lawn formed on the plate. The 6th phage obtained in one or more embodiments of the present invention exhibited bacteriolytic ability against all the bacteria of the Xanthomonas genus shown in Table 9. On the other hand, the phage did not exhibit bacteriolytic ability against Pseudomonas fluorescens. As with Example 3, the phage exhibited bacteriolytic ability against each of the bacteria of the Xanthomonas genus separated in different places. This suggests that the 6th phage isolated exhibited bacteriolytic ability against a wide range of bacteria of the Xanthomonas genus.

[0409] Additionally, these results suggest that the 6th phage is useful for control of shot hole disease of Prunus spp., which is caused by bacteria of the Xanthomonas genus.

### (5) Genomic Analysis of 6th Phage

[0410] The genomic DNA sequence of the 6th phage was determined and analyzed.

### (i) Preparation and Sequencing of Genomic DNA of 6th Phage

[0411] The genome of the 6th phage was extracted using a TURBO DNA-free™ kit (Thermo Fisher Scientific Inc.). The basic operation was in accordance with the method described in “(5) Genomic Analysis of 1st Phage, (i) Preparation and Sequencing of Genomic DNA of 1st Phage” in Example 1.

(ii) Bioinformatics Analysis based on Genomic Sequence Information

[0412] On the basis of the genomic nucleotide sequence (SEQ ID NO: 23) of the 6th phage obtained in (i) above, and using the NCBI-provided BLAST server (the same as the above), similar DNA sequences were searched for, and the sequence identities were verified. As a result of the search, four phages (the access codes: NC_017864.1, NC_007806.1, NC_029019.1, and NC_024381.1) exhibited a sequence identity of 96.5 to 98.5% over the range of approximately 90% of the full length of the genome. The sequence identity to the full length is estimated to correspond to a value of approximately 85%. Despite such a high sequence identity, however, the target bacteria of these known phages are not Xanthomonas genus but Pseudomonas genus or Stenotrophomonas genus. Accordingly, this suggests that the 6th phage is a completely novel phage as a phage having bacteria of the Xanthomonas genus as the target bacteria.

[0413] Accordingly, to identify a gene related to target bacteria, the genomic sequence of the 6th phage and the above-described four known phages were compared. Furthermore, an ORF was identified in a region with the low sequence identity to the known phages, which was discovered by the comparison. The ORF was identified utilizing RAST server (https://rast.nmpdr.org/) and PHASTER (https://phaster.ca/).

[0414] The comparison has revealed that the ranges from position 8062 to position 9473 and from position 31995 to position 34230 in the genomic nucleotide sequence of SEQ ID NO: 23 are regions having a low sequence identity to the known phages. In these regions, a total of five ORFs were detected. Specifically, the ORFs were the DNA regions of the nucleotide sequences from position 8082 to position 8573, from position 8645 to position 8842, from position 9223 to position 9477, from position 31881 to position 32789, and from position 32792 to position 33694 in the genomic nucleotide sequence of SEQ ID NO: 23, respectively.

[0415] Each ORF was scrutinized to reveal the gene important for determining a host range. Consequently, in the 6th phage isolated in Example 6, the nucleotide sequence (SEQ ID NO: 22) from position 9223 to position 9477 in the genomic nucleotide sequence of SEQ ID NO: 23 has been estimated to be an important gene region with a high sequence identity, because it had the highest number of hits of nucleotide sequences with a sequence identity of 30% or more to known bacteriophages that target bacteria of the Xanthomonas genus.

[0416] To reveal whether this gene is a known gene, the NCBI-provided BLAST server was extensively searched for amino acid sequences similar to the amino acid sequence (SEQ ID NO: 21), which is a translation product, without limitation to a bacteriophage targeting bacteria of the Xanthomonas genus. Consequently, even a sequence that had the highest analogous score had a sequence identity as small as approximately 50%, and no sequence exhibiting a high sequence identity was detected.

### Example 7: Isolation of Novel Bacteriophage, and Bacteriolytic Ability Thereof (7)

[0417] The purpose is to isolate a novel bacteriophage having bacteriolytic ability against pathogenic bacteria of a plant disease, and verify the bacteriolytic ability against the plant pathogenic bacteria.

### (Purpose)

### (Methods and Results)

### (1) Obtainment and Culture of Plant Pathogenic Bacteria

[0418] In one or more embodiments of the present invention, the plant pathogenic bacteria as target bacteria were bacteria of the Xanthomonas genus, and all the bacterial strains were obtained from the National Agriculture and Food Research Organization (NARO). Each of the bacteria used in this Example is listed in Table 10, together with the deposition numbering (MAFF No.) by the National Agriculture and Food Research Organization.

TABLE 10

| | | Source of | Place of |
|---|---|---|---|
| ID | Species | Isolation | Harvest |
| MAFF No. 211971 | Xanthomonas arboricola | Peach | Yamanashi |
| | pv. pruni | | |
| MAFF No. 311351 | Xanthomonas arboricola | Peach | Fukushima |
| | pv. pruni | | |
| MAFF No. 311622 | Xanthomonas arboricola | Peach | Yamanashi |
| | pv. pruni | | |
| MAFF No. 106765 | Xanthomonas campestris | Broccoli | Ibaraki |
| | pv. campestris | | |
| MAFF No. 106642 | Xanthomonas campestris | Fescue | Ibaraki |
| | pv. campestris | | |
| NCIMB-ID: 10460 | Pseudomonas fluorescens | Egg | U.S.A. |

[0419] As a control, a Pseudomonas fluorescens bacterial strain (NCIMB-ID: 10460), which is of Pseudomonas genus, was obtained from NCIMB, a laboratory in The United Kingdom National Culture Collection, UKNCC.

[0420] Bacteria of the Xanthomonas genus and Pseudomonas fluorescens were cultured in accordance with the method described in “(1) Obtainment and Culture of Plant Pathogenic Bacteria” in Example 1.

### (2) Isolation and Purification of 7th Phage

[0421] A novel phage was isolated from natural dirty water or soil obtained in Japan. A method for isolation and a method for purification were in accordance with the methods described in “(2) Isolation and Purification of 1st Phage” in Example 1. Consequently, two kinds of new phages were isolated from natural dirty water and soil. These novel phages isolated in Example 7 are referred to as “7th phage”.

[0422] The isolated phage was suspended in an SM Buffer, passed through a 0.2 μm filter, and collected in the form of a phage-containing solution. This phage-containing solution was mixed with the bacteria suspension under the above-described conditions to isolate a phage again. This procedure was repeated several times to purify the phage.

### (3) Amplification and Refinement of 7th Phage

[0423] The 7th phage isolated and purified was amplified and refined by the plate lysate (PL) method. Specific method was in accordance with the method described in “(3) Amplification and Refinement of 1st Phage” in Example 1. The titer of the refined solution of the 7th phage prepared was determined by a plaque assay method using a solution suitably diluted, and was confirmed to be 108 PFU/mL or more.

### (4) Evaluation of Host Range of 7th Phage

[0424] The host range of the 7th phage was evaluated by the spot test method. The basic operation was in accordance with the method described in “(4) Evaluation of Host Range of 1st Phage” in Example 1.

[0425] One example of the results is shown in FIGS. 7A-7B. When the 7th phage exhibited bacteriolytic ability, only the site where the refined solution of phage was dropped became clear in the bacterial lawn formed on the plate. The 7th phage obtained in one or more embodiments of the present invention exhibited bacteriolytic ability against all the bacteria of the Xanthomonas genus shown in Table 10. On the other hand, the phage did not exhibit bacteriolytic ability against Pseudomonas fluorescens. As with Example 1, the phage exhibited bacteriolytic ability against each of the diverse bacterial species, and exhibited bacteriolytic ability against each of the bacterial strains separated in different places. This suggests that the 7th phage isolated exhibited bacteriolytic ability against a wide range of bacteria of the Xanthomonas genus.

[0426] Additionally, these results suggest that the 7th phage is useful for control of shot hole disease of Prunus spp. and black rot disease of broccoli, which are caused by bacteria of the Xanthomonas genus.

### (5) Genomic Analysis of 7th Phage

[0427] The genomic DNA sequence of the 7th phage was determined and analyzed.

### (i) Preparation and Sequencing of Genomic DNA of 7th Phage

[0428] The genome of the 7th phage was extracted using a TURBO DNA-freeIM kit (Thermo Fisher Scientific Inc.). The basic operation was in accordance with the method described in “(5) Genomic Analysis of 1st Phage, (i) Preparation and Sequencing of Genomic DNA of 1st Phage” in Example 1.

(ii) Bioinformatics Analysis based on Genomic Sequence Information

[0429] On the basis of the genomic nucleotide sequences (SEQ ID NOs: 28 and 29) of the 7th phage obtained in (i) above, and using the NCBI-provided BLAST server (the same as the above), similar DNA sequences were searched for, and the sequence identities were verified. As a result of the search, the genomic sequences of the phages described in JP 2021-102635 (SEQ ID NOs: 19 and 20 in the literature (herein, SEQ ID NOs: 30 and 31 respectively)) had the highest analogous score. Both sequences had a sequence identity of approximately 92% over the range of 90% of the full length. From this result, the sequence identity to the full length is estimated to correspond to a value of approximately 85%. Additionally, the genomic nucleotide sequence of ΦXc10 (Nakayinga R. et al., BMC Microbiology, 2021, 21:291) had the next highest analogous score. The genomic nucleotide sequence of the ΦXc10 (the access code: NC_047840.1) had a sequence identity of approximately 92% over the range of 87% of the full length. From this result, the sequence identity to the full length is estimated to correspond to a value of approximately 80%. Furthermore, the genomic nucleotide sequences of f30-Xaj and f20-Xaj (Nakayinga R. et al., 2021, ibid.) had a high analogous score in the same manner. The genomic nucleotide sequences of the f30-Xaj and f20-Xaj (the access code: NC_030937.1 and NC_030928.1) had a sequence identity of approximately 91% over the range of 74% of the full length. From this result, the sequence identity to the full length is estimated to correspond to a value of approximately 70%. However, none of those phages targets the bacteria Xanthomonas arboricola pv. pruni.

[0430] To seek the cause of the difference in the target bacteria, the genomic nucleotide sequence information (SEQ ID NO: 28) of the 7th phage was searched for a novel gene. The gene region was estimated utilizing a RAST server (https://rast.nmpdr.org/) and PHASTER (https://phaster.ca/). As a result of the search, a group of genes encoding novel tail tubular proteins (tail tubular proteins) were identified as genes related to the host range of the 7th phage. These gene regions were located in the region with the nucleotide sequence that is the same between the genomic nucleotide sequences of the two kinds of 7th phages obtained in (i).

[0431] SEQ ID NO: 26 shows the nucleotide sequence of the tail tubular protein A gene comprised in the genomic nucleotide sequence (SEQ ID NO: 28) of the 7th phage obtained in this Example, and SEQ ID NO: 24 shows the amino acid sequence of the tail tubular protein A. On the other hand, SEQ ID NO: 27 (correctly SEQ ID NO: 58) shows the nucleotide sequence of the tail tubular protein B gene, and SEQ ID NO: 25 (correctly SEQ ID NO: 57) shows the amino acid sequence of the tail tubular protein B.

[0432] The tail tubular protein A and the tail tubular protein B are reported to be involved in the specific attachment of a phage to bacteria (Maozhi Hu, et al., 2020, 9:1, 855-867), and hence, there is a high possibility that the proteins are also related to the host range of the 7th phage. However, when the NCBI-provided BLAST server was searched on the basis of the amino acid sequence (SEQ ID NO: 24) of the tail tubular protein A and the amino acid sequence (SEQ ID NO: 25 (correctly SEQ ID NO: 57)) of the tail tubular protein B, there was no amino acid sequence having a sequence identity of 97% or more to either of the sequences. The sequence having the highest sequence identity of approximately 96% was the amino acid sequence of each of the tail tubular proteins of the above-described QXc10 and f20-Xaj.

[0433] The above-described facts suggest that these proteins are novel tail tubular proteins that mediate the bacteriolytic action against bacteria of the Xanthomonas genus.

### Example 8: Isolation of Novel Bacteriophage, and Bacteriolytic Ability Thereof (8)

### (Purpose)

[0434] The purpose is to isolate a novel bacteriophage having bacteriolytic ability against pathogenic bacteria of a plant disease, and verify the bacteriolytic ability against the plant pathogenic bacteria.

### (Methods and Results)

### (1) Obtainment and Culture of Plant Pathogenic Bacteria

[0435] In one or more embodiments of the present invention, the plant pathogenic bacteria as target bacteria were bacteria of the Xanthomonas genus, and all the bacterial strains were obtained from the National Agriculture and Food Research Organization (NARO). Each of the bacteria used in this Example is listed in Table 11, together with the deposition numbering (MAFF No.) by the National Agriculture and Food Research Organization.

TABLE 11

| | | Source of | Place of |
|---|---|---|---|
| ID | Species | Isolation | Harvest |
| MAFF No. 211971 | Xanthomonas arboricola | Peach | Yamanashi |
| | pv. pruni | | |
| MAFF No. 311282 | Xanthomonas arboricola | Peach | Fukushima |
| | pv. pruni | | |
| MAFF No. 301420 | Xanthomonas arboricola | Peach | Nagano |
| | pv. pruni | | |
| MAFF No. 301426 | Xanthomonas arboricola | Peach | Fukushima |
| | pv. pruni | | |
| MAFF No. 311351 | Xanthomonas arboricola | Peach | Fukushima |
| | pv. pruni | | |
| MAFF No. 311414 | Xanthomonas arboricola | Peach | Fukushima |
| | pv. pruni | | |
| MAFF No. 311417 | Xanthomonas arboricola | Peach | Fukushima |
| | pv. pruni | | |
| MAFF No. 311562 | Xanthomonas arboricola | Peach | Yamanashi |
| | pv. pruni | | |
| MAFF No. 311571 | Xanthomonas arboricola | Peach | Fukushima |
| | pv. pruni | | |
| MAFF No. 311618 | Xanthomonas arboricola | Peach | Wakayama |
| | pv. pruni | | |
| MAFF No. 311622 | Xanthomonas arboricola | Peach | Yamanashi |
| | pv. pruni | | |
| NCIMB-ID: 10460 | Pseudomonas fluorescens | Egg | U.S.A. |

[0436] As a control, a Pseudomonas fluorescens bacterial strain (NCIMB-ID: 10460), which is of Pseudomonas genus, was obtained from NCIMB, a laboratory in The United Kingdom National Culture Collection, UKNCC.

[0437] Bacteria of the Xanthomonas genus and Pseudomonas fluorescens were cultured in accordance with the method described in “(1) Obtainment and Culture of Plant Pathogenic Bacteria” in Example 1.

### (2) Isolation and Purification of 8th Phage

[0438] A novel phage was isolated from natural dirty water, soil, or part of a plant (leaf) obtained in Japan. A method for isolation and a method for purification were in accordance with the methods described in “(2) Isolation and Purification of 1st Phage” in Example 1. Consequently, five kinds of new phages were isolated from natural dirty water or soil or water having part of a plant immersed therein. These novel phages isolated in Example 8 are referred to as an “8th phage”.

[0439] The isolated phage was suspended in an SM Buffer, passed through a 0.2 μm filter, and collected in the form of a phage-containing solution. This phage-containing solution was mixed with the bacteria suspension under the above-described conditions to isolate a phage again. This procedure was repeated several times to purify the phage.

### (3) Amplification and Refinement of 8th Phage

[0440] The 8th phage isolated and purified was amplified and refined by the plate lysate (PL) method. Specific method was in accordance with the method described in “(3) Amplification and Refinement of 1st Phage” in Example 1. The titer of the refined solution of the 8th phage prepared was determined by a plaque assay method using a solution suitably diluted, and was confirmed to be 108 PFU/mL or more.

### (4) Evaluation of Host Range of 8th Phage

[0441] The host range of the 8th phage was evaluated by the spot test method. The basic operation was in accordance with the method described in “(4) Evaluation of Host Range of 1st Phage” in Example 1.

[0442] One example of the results is shown in FIGS. 8A-8B and FIGS. 9A-9B. When the 8th phage exhibited bacteriolytic ability, only the site where the refined solution of phage was dropped became clear in the bacterial lawn formed on the plate. The 8th phage obtained in one or more embodiments of the present invention exhibited bacteriolytic ability against all the bacteria of the Xanthomonas genus shown in Table 11. On the other hand, the phage did not exhibit bacteriolytic ability against Pseudomonas fluorescens. As with Example 3, the phages exhibited bacteriolytic ability against each of the bacteria of the Xanthomonas genus separated in different places. This suggests that the 8th phage isolated exhibited bacteriolytic ability against a wide range of bacteria of the Xanthomonas genus.

[0443] Additionally, these results suggest that the 8th phage is useful for control of shot hole disease of Prunus spp., which is caused by bacteria of the Xanthomonas genus.

### (5) Genomic Analysis of 8th Phage

[0444] The genomic DNA sequence of the 8th phage was determined and analyzed.

### (i) Preparation and Sequencing of Genomic DNA of 8th Phage

[0445] The genome of the 8th phage was extracted using a TURBO DNA-free™ kit (Thermo Fisher Scientific Inc.). The basic operation was in accordance with the method described in “(5) Genomic Analysis of 1st Phage, (i) Preparation and Sequencing of Genomic DNA of 1st Phage” in Example 1.

(ii) Bioinformatics Analysis based on Genomic Sequence Information

[0446] On the basis of the genomic nucleotide sequences (SEQ ID NOs: 18 and 19) of the 8th phage obtained in (i) above, and using the NCBI-provided BLAST server (the same as the above), similar DNA sequences were searched for, and the sequence identities were verified. As a result of the search, there was no hit for sequence with a sequence identity of 80% or more to any of SEQ ID NOs: 32 to 36 over the range of 50% or more of the full length. Furthermore, there was no hit for sequence with a sequence identity of 90% or more to any of SEQ ID NOs: 32 to 36 over the range of 20% or more of the full length, as well. This result suggests that each of the 8th phages isolated in Example 8 is a phage having a basically novel genomic sequence, the analogous sequence of which has not been reported.

[0447] Additionally, a sequence identity between the genomic DNA sequences of each phage of SEQ ID NOs: 32 to 36 was analyzed with BLAST using GENETYX-NGS packaged in the genetic information processing software GENETYX (https://www.genetyx.co.jp/). The sequence identities based on the average nucleotide identity (ANI) as the index are as shown in Table 12 below.

TABLE 12

| | SEQ ID NO: 32 | SEQ ID NO: 33 | SEQ ID NO: 34 | SEQ ID NO: 35 | SEQ ID NO: 36 |
|---|---|---|---|---|---|
| SEQ ID NO: 32 | | 99.98/99.33 | 98.41/98.96 | 100/99.86 | 99.97/97.57 |
| SEQ ID NO: 33 | 99.98/97.72 | | 98.47/99.03 | 99.97/99.79 | 99.91/97.79 |
| SEQ ID NO: 34 | 99.52/93.22 | 99.55/93.12 | | 99.52/90.98 | 99.54/90.83 |
| SEQ ID NO: 35 | 100/97.70 | 99.97/97.70 | 99.15/94.81 | | 99.89/99.65 |
| SEQ ID NO: 36 | 99.88/99.70 | 99.91/99.69 | 99.44/93.11 | 99.88/97.72 | |

[0448] In Table 12, each of the ANI value and range to be compared of the genomic DNA sequence of the row with respect to the genomic DNA sequence of the column is shown in the form of “ANI value (%)/range to be compared (%)”. Here, the range to be compared (%) in Table 12 is the ratio of a region aligned with respect to the genomic DNA sequence of the corresponding row out of the genomic DNA sequence of the corresponding column. For example, when the ANI value (%)/the range to be compared (%) is “90/90”, the genomic DNA sequence of the corresponding row has a sequence identity of 90% to the genomic DNA sequence of the corresponding column over the range of 90% of the full length.

[0449] Each of the phages of SEQ ID NOs: 32 to 36 has different genomic DNA sequence lengths, and thus, in Table 12, the ANI value and range to be compared of the genomic DNA sequence of each row with respect to the genomic DNA sequence of each column may be subtly different from the ANI value and range to be compared when the row and the column are interchanged. For example, when the ANI value and range to be compared for the row of SEQ ID NO: 32 and the column of SEQ ID NO: 35 and the ANI value and range to be compared for the row of SEQ ID NO: 35 in the column of SEQ ID NO: 32 are compared, the ANI value is 100% for both, but the values of the range to be compared are different because SEQ ID NOs: 32 and 35 have different genome lengths.

[0450] As shown in Table 12, the nucleotide sequences of SEQ ID NOs: 32 to 36 have a sequence identity of 98 to 100% to one another over the range of 90% to 100%, and have been revealed to be very similar to one another. The sequence identity of SEQ ID NO: 35 to SEQ ID NO: 36 in the whole range was the lowest at 90%, when the sequence identity in the whole range was estimated by multiplying the ANI value and range to be compared in Table 12.

[0451] The results of comparison of the genomic DNA sequences of the above-described phages have revealed that a phage having a genomic DNA sequence comprising a nucleotide sequence having a sequence identity of 90% or more to the nucleotide sequence of any of SEQ ID NOs: 32 to 36, i.e., a phage having a genomic DNA sequence comprising the nucleotide sequence with addition, deletion, and/or substitution of approximately 10% of the nucleotides in the nucleotide sequence of any of SEQ ID NOs: 32 to 36, also has essentially the same host range and bacteriolytic ability as a phage having the genomic DNA sequence of any of SEQ ID NOs: 32 to 36.

### Example 9: Isolation of Novel Bacteriophage, and Bacteriolytic Ability Thereof (9)

### (Purpose)

[0452] The purpose is to isolate a novel bacteriophage having bacteriolytic ability against pathogenic bacteria of a plant disease, and verify the bacteriolytic ability against the plant pathogenic bacteria.

### (Methods and Results)

### (1) Obtainment and Culture of Plant Pathogenic Bacteria

[0453] In one or more embodiments of the present invention, the plant pathogenic bacteria as target bacteria were bacteria of the Xanthomonas genus, and all the bacterial strains were obtained from the National Agriculture and Food Research Organization (NARO). Each of the bacteria used in this Example is listed in Table 13, together with the deposition numbering (MAFF No.) by the National Agriculture and Food Research Organization.

TABLE 13

| | | Source of | Place of |
|---|---|---|---|
| ID | Species | Isolation | Harvest |
| MAFF No. 311622 | Xanthomonas arboricola | Peach | Yamanashi |
| | pv. pruni | | |
| MAFF No. 212146 | Xanthomonas arboricola | Walnut | Nagano |
| | pv. juglandis | | |
| MAFF No. 301078 | Xanthomonas citri | Orange | Wakayama |
| | subsp. citri | | |
| MAFF No. 301260 | Xanthomonas campestris | Pepper | Tokushima |
| | pv. vesicatoria | | |
| MAFF No. 301352 | Xanthomonas campestris | Lettuce | Wakayama |
| | pv. vitians | | |
| MAFF No. 301354 | Xanthomonas campestris | Lettuce | Chiba |
| | pv. vitians | | |
| MAFF No. 106783 | Xanthomonas campestris | Chinese | Shizuoka |
| | pv. campestris | cabbage | |
| MAFF No. 106181 | Xanthomonas campestris | Radish | Aomori |
| | pv. raphani | | |
| NCIMB-ID 10460 | Pseudomonas fluorescens | Egg | U.S.A. |

[0454] As a control, a Pseudomonas fluorescens bacterial strain (NCIMB-ID: 10460) that is reported to have a plant growth promoting action and the like, and is beneficial to the environment was obtained from NCIMB, a laboratory in The United Kingdom National Culture Collection, UKNCC.

[0455] Each of bacteria of the Xanthomonas genus and Pseudomonas fluorescens were cultured in accordance with the method described in “(1) Obtainment and Culture of Plant Pathogenic Bacteria” in Example 1.

### (2) Isolation and Purification of 9th Phage

[0456] A novel phage was isolated from natural dirty water, soil, or part of a plant (leaf) obtained in Japan. A method for isolation and a method for purification were in accordance with the methods described in “(2) Isolation and Purification of 1st Phage” in Example 1. Consequently, five kinds of new phages were isolated from natural dirty water or soil or water having part of a plant immersed therein. These novel phages isolated in Example 9 are referred to as a “9th phage”.

[0457] The isolated phage was suspended in an SM Buffer, passed through a 0.2 μm filter, and collected in the form of a phage-containing solution. This phage-containing solution was mixed with the bacteria suspension under the above-described conditions to isolate a phage again. This procedure was repeated several times to purify the phage.

### (3) Amplification and Refinement of 9th Phage

[0458] The 9th phage isolated and purified was amplified and refined by the plate lysate (PL) method. Specific method was in accordance with the method described in “(3) Amplification and Refinement of 1st Phage” in Example 1. The titer of the refined solution of the 9th phage prepared was determined by a plaque assay method using a solution suitably diluted, and was confirmed to be 108 PFU/mL or more.

### (4) Evaluation of Host Range of 9th Phage

[0459] The host range of the 9th phage was evaluated by the spot test method. The basic operation was in accordance with the method described in “(4) Evaluation of Host Range of 1st Phage” in Example 1.

[0460] One example of the results is shown in FIGS. 10A-10B. When the phage exhibited bacteriolytic ability, only the site where the refined solution of phage was dropped became clear in the bacterial lawn formed on the plate. The phages obtained in one or more embodiments of the present invention exhibited bacteriolytic ability against all the bacterial strains belonging to the three species of bacteria: Xanthomonas arboricola, Xanthomonas citri, and Xanthomonas campestris, which are shown in Table 13. Additionally, in the case of Xanthomonas arboricola and Xanthomonas campestris, the phages exhibited bacteriolytic ability against the bacterial strains of different pathovars. On the other hand, it has also been verified that the phages do not exhibit bacteriolytic ability against Pseudomonas fluorescens. There is an example of a report that a phage exhibits the ability against two or more species of bacteria of the Xanthomonas genus, but such a pattern as described above, including a pathovar, has not been reported (Nakayinga R. et al., BMC Microbiology, 2021, 21:291). This result suggests the possibility that a phage of one or more embodiments of the present invention can be applied to various plant diseases. For example, this suggests the usefulness for control of shot hole disease of Prunus spp., orange bacterial canker, black rot disease of broccoli, and the like, which are caused by bacteria of the Xanthomonas genus, and is expected to be very valuable in industrial uses.

[0461] (5) Genomic Analysis of 9th Phage

[0462] The genomic DNA sequence of the 9th phage was determined and analyzed.

### (i) Preparation and Sequencing of Genomic DNA of 9th Phage

[0463] The genome of the 9th phage was extracted using a TURBO DNA-free™ kit (Thermo Fisher Scientific Inc.). The basic operation was in accordance with the method described in “(5) Genomic Analysis of 1st Phage, (i) Preparation and Sequencing of Genomic DNA of 1st Phage” in Example 1.

(ii) Bioinformatics Analysis based on Genomic Sequence Information

[0464] On the basis of the genomic nucleotide sequence (SEQ ID NO: 41) of the 9th phage obtained in (i) above, and using the NCBI-provided BLAST server (the same as the above), similar DNA sequences were searched for, and the sequence identities were verified. As a result of the search, the genomic sequence (the NCBI access code: MT951568.1) of a phage “Xanthomonas phage Xaa_vB_phi31” listed in the NCBI database had the highest analogous score. The sequence had a sequence identity of approximately 85% over the range of 80% of the full length. From this result, the sequence identity to the full length is estimated to correspond to a value of approximately 68%. As a host of Xaa_vB_phi31, only Xanthomonas euvesicatoria pv. allii XaaBL11 was described. There was no information suggesting that other phages that made a high analogous score also exhibit bacteriolytic ability against a wide range of various species of bacteria of the Xanthomonas genus as for the 9th phage.

[0465] To seek the cause of the difference in the target bacteria, the genomic nucleotide sequence information (SEQ ID NO: 41) on the 9th phage was searched for a novel gene. The gene region was estimated utilizing a RAST server (https://rast.nmpdr.org/) and PHASTER (https://phaster.ca/). As a result of the search, a group of genes encoding novel tail tubular proteins (tail tubular proteins) were identified as genes related to the host range of the phage.

[0466] SEQ ID NO: 39 shows the nucleotide sequence of the tail tubular protein A gene comprised in the genomic nucleotide sequence (SEQ ID NO: 41) of the 9th phage obtained in this Example, and SEQ ID NO: 37 shows the amino acid sequence of the tail tubular protein A. On the other hand, SEQ ID NO: 40 shows the nucleotide sequence of the tail tubular protein B gene, and SEQ ID NO: 38 shows the amino acid sequence of the tail tubular protein B.

[0467] The tail tubular protein A and the tail tubular protein B are reported to be involved in the specific attachment of a phage to bacteria (Maozhi Hu, et al., 2020, 9:1, 855-867), and hence, there is a high possibility that the proteins are also related to the host range of the 9th phage. However, when the NCBI-provided BLAST server was searched on the basis of the amino acid sequence (SEQ ID NO: 37) of the tail tubular protein A and the amino acid sequence (SEQ ID NO: 38) of the tail tubular protein B, there was no amino acid sequence having a sequence identity of 97% or more to either of the sequences. As to the amino acid sequence of a tail tubular protein A, the amino acid sequence of the tail tubular protein A of the above-described Xanthomonas phage Xaa_vB_phi31 exhibited the highest sequence identity of approximately 95%. The sequence identity between the nucleotide sequence of SEQ ID NO: 39 and the nucleotide sequence encoding the tail tubular protein A of Xaa_vB_phi31 was approximately 89%. As to the amino acid sequence of a tail tubular protein B, the amino acid sequence of the tail tubular protein B of Xaa_vB_phi31 also exhibited the highest sequence identity of approximately 91%. Additionally, the sequence identity of the nucleotide sequence of the gene to the nucleotide sequence of SEQ ID NO: 40 was approximately 86%.

[0468] The above-described facts suggest that these proteins are novel tail tubular proteins that mediate the bacteriolytic action against bacteria of the Xanthomonas genus.

### Example 10: Isolation of Novel Bacteriophage, and Bacteriolytic Ability Thereof (10)

### (Purpose)

[0469] The purpose is to isolate a novel bacteriophage having bacteriolytic ability against pathogenic bacteria of a plant disease, and verify the bacteriolytic ability against the plant pathogenic bacteria.

### (Methods and Results)

### (1) Obtainment and Culture of Plant Pathogenic Bacteria

[0470] In this Example, the plant pathogenic bacteria were bacteria of the Xanthomonas genus, and all the bacterial strains were obtained from the National Agriculture and Food Research Organization (NARO). Each of the bacteria used in this Example are the same as the bacteria listed in Table 13 in Example 9.

[0471] As a control, a Pseudomonas fluorescens bacterial strain (NCIMB-ID: 10460), which is of Pseudomonas genus, was obtained from NCIMB, a laboratory in The United Kingdom National Culture Collection, UKNCC.

[0472] Bacteria of the Xanthomonas genus and Pseudomonas fluorescens were cultured in accordance with the method described in “(1) Obtainment and Culture of Plant Pathogenic Bacteria” in Example 1.

### (2) Isolation and Purification of 10th Phage

[0473] A novel phage was isolated from natural dirty water or soil obtained in Japan. A method for isolation and a method for purification were in accordance with the methods described in “(2) Isolation and Purification of 1st Phage” in Example 1. Consequently, one kind of new phage was isolated from natural dirty water and soil. This novel phage isolated in Example 10 is referred to as a “10th phage”.

[0474] The isolated phage was suspended in an SM Buffer, passed through a 0.2 μm filter, and collected in the form of a phage-containing solution. This phage-containing solution was mixed with the bacteria suspension under the above-described conditions to isolate a phage again. This procedure was repeated several times to purify the phage.

### (3) Amplification and Refinement of 10th Phage

[0475] The 10th phage isolated and purified was amplified and refined by the plate lysate (PL) method. Specific method was in accordance with the method described in “(3) Amplification and Refinement of 1st Phage” in Example 1. The titer of the refined solution of the 10th phage was determined by a plaque assay method using a solution suitably diluted, and was confirmed to be 108 PFU/mL or more.

### (4) Evaluation of Host Range of 10th Phage

[0476] The host range of the 10th phage was evaluated by a spot test method. The basic operation was in accordance with the method described in “(4) Evaluation of Host Range of 1st Phage” in Example 1.

[0477] One example of the results is shown in FIGS. 11A-11B. When the phage exhibited bacteriolytic ability, only the site where the refined solution of phage was dropped became clear in the bacterial lawn formed on the plate. The 10th phage exhibited bacteriolytic ability against all the bacterial strains belonging to the three species of bacteria: Xanthomonas arboricola, Xanthomonas citri, and Xanthomonas campestris, which are shown in Table 13. Additionally, in the case of Xanthomonas arboricola and Xanthomonas campestris, the phages exhibited bacteriolytic ability against the bacterial strains of different pathovars. On the other hand, it has also been verified that the phage does not exhibit bacteriolytic ability against Pseudomonas fluorescens. There is an example of a report that a phage exhibits the ability against two or more species of bacteria of the Xanthomonas genus, but such a pattern as described above, including a pathovar, has not been reported (Nakayinga R. et al., BMC Microbiology, 2021, 21:291). This result suggests the possibility that the 10th phage can be applied to various plant diseases. For example, this suggests the usefulness for control of shot hole disease of Prunus spp., orange bacterial canker, black rot disease of broccoli, and the like, which are caused by a bacteria of the Xanthomonas genus, and is expected to be very valuable in industrial uses.

### (5) Genomic Analysis of 10th Phage

[0478] The genomic DNA sequence of the 10th phage was determined and analyzed.

### (i) Preparation and Sequencing of Genomic DNA of 10th Phage

[0479] The genome of the 10th phage was extracted using a TURBO DNA-free™ kit (Thermo Fisher Scientific Inc.). The basic operation was in accordance with the method described in “(5) Genomic Analysis of 1st Phage, (i) Preparation and Sequencing of Genomic DNA of 1st Phage” in Example 1.

(ii) Bioinformatics Analysis based on Genomic Sequence Information

[0480] On the basis of the genomic nucleotide sequence (SEQ ID NO: 44) of the 10th phage obtained in (i) above, and using the NCBI-provided BLAST server (the same as the above), similar DNA sequences were searched for, and the sequence identities were verified. As a result of the search, a phage (the name: RiverRider; the NCBI access code: NC_048703.1) separated in the U.S.A. and described in the literature of Miller et al. (Miller M. et al., Archives of Virology, 2020, 165:1481-1484) had the highest analogous score. The sequence identity was approximately 91% to SEQ ID NO: 44 over the range of approximately 80% of the full length, and a sequence identity to the full length of the genomic sequence was 80% or less (corresponding to approximately 73%). This result has revealed that the 10th phage isolated in this Example is a phage having a novel genomic sequence.

[0481] Generally, it is considered that the characteristics related to the host specificity and host range of a phage depend largely on the role of a tail fiber protein (Nobrega F. L. et al., Nat. Rev. Microbiol., 2018, 16:760-773). Accordingly, the genomic sequence information on the phage was searched for tail fiber genes. Utilizing the RAST server (https://rast.nmpdr.org/) and PHASTER (https://phaster.ca/), the nucleotide sequence of SEQ ID NO: 43 was identified as an estimated tail fiber gene from the genomic sequence of the 10th phage. A DNA sequence similar to this gene sequence was searched for, and consequently, the sequence of the tail fiber gene of the above-described phage RiverRider had the highest analogous score. The sequence identity of this nucleotide sequence was approximately 77% in the first half (1st to 890th: corresponding to approximately 52% of the full length) of the nucleotide sequence of SEQ ID NO: 43. As to the amino acid sequence of SEQ ID NO: 42, the sequence having the highest analogous score was the tail fiber protein of RiverRider as well. The sequence identity of the amino acid sequence was approximately 82% over approximately 52% of the full length. This has revealed that the tail fiber protein of the 10th phage is a novel protein to which no other protein is highly analogous, and is a protein characteristic particularly to a phage of one or more embodiments of the present invention, compared with a known phage.

[0482] As to the host bacteria of the phage RiverRider, the above-described literature states that the phage exhibited bacteriolytic ability against Xanthomonas fragariae, but exhibited bacteriolytic ability against neither Xanthomonas arboricola nor Xanthomonas campestris. Accordingly, this phage has a clearly different host range from the 10th phage, suggesting that a large difference in the host range between the phage RiverRider and the phage obtained in this Example is due to a difference in the tail fiber gene.

[0483] From the above-described results, it has been estimated that the 10th phage has a conventionally unreported novel host range in the Xanthomonas genus, and that the characteristics of the phage rely on the novel tail fiber gene in particular.

### Example 11: Isolation of Novel 2nd Bacteriophage, and Bacteriolytic Ability Thereof

### (Purpose)

[0484] The purpose is to isolate a novel bacteriophage having bacteriolytic ability against pathogenic bacteria of a plant disease, and verify the bacteriolytic ability against the plant pathogenic bacteria.

### (Methods and Results)

### (1) Obtainment and Culture of Plant Pathogenic Bacteria

[0485] In this Example, the plant pathogenic bacteria as target bacteria were bacteria of the Xanthomonas genus, and all the bacterial strains were obtained from the National Agriculture and Food Research Organization (NARO). In this Example, the bacteria listed in Table 14 were used in addition to the bacterium described in Table 4.

TABLE 14

| | | Source of | Place of |
|---|---|---|---|
| ID | Species | Isolation | Harvest |
| MAFF No. | Xanthomonas campestris | Broccoli | Ibaraki |
| 106765 | pv. campestris | | |

[0486] Additionally, as a control, a Pseudomonas fluorescens bacterial strain (NCIMB-ID: 10460), which is of Pseudomonas genus, was obtained from NCIMB, a laboratory in The United Kingdom National Culture Collection, UKNCC.

[0487] Bacteria of the Xanthomonas genus and Pseudomonas fluorescens were cultured in accordance with the method described in “(1) Obtainment and Culture of Plant Pathogenic Bacteria” in Example 1.

### (2) Isolation and Purification of Phage

[0488] A novel phage was isolated from natural dirty water or soil obtained in Japan. A method for isolation and a method for purification were in accordance with the methods described in “(2) Isolation and Purification of 1st Phage” in Example 1. Consequently, two kinds of new phages were isolated from natural dirty water and soil.

[0489] The isolated phage was suspended in an SM Buffer, passed through a 0.2 μm filter, and collected in the form of a phage-containing solution. This phage-containing solution was mixed with the bacteria suspension under the above-described conditions to isolate a phage again. This procedure was repeated several times to purify the phage.

### (3) Amplification and Refinement of Phage

[0490] The 10th phage isolated and purified was amplified and refined by the plate lysate (PL) method. Specific method was in accordance with the method described in “(3) Amplification and Refinement of 1st Phage” in Example 1. The titer of the refined solution of phage prepared was determined by a plaque assay method using a solution suitably diluted, and was confirmed to be 108 PFU/mL or more.

### (4) Evaluation of Host Range of Phage

[0491] The host range of the phage was evaluated by a spot test method. The basic operation was in accordance with the method described in “(4) Evaluation of Host Range of 1st Phage” in Example 1.

[0492] One example of the results is shown in FIGS. 14A-14B and FIGS. 15A-15B. When the phage exhibited bacteriolytic ability, only the site where the refined solution of phage was dropped became clear in the bacterial lawn formed on the plate. Two kinds of phages obtained in one or more embodiments of the present invention exhibited bacteriolytic ability against all the bacteria of the Xanthomonas genus shown in Table 4, in the same manner as the 2nd phage did (FIGS. 14A-14B). On the other hand, the phages did not exhibit bacteriolytic ability against Pseudomonas fluorescens. This suggests the possibility that the two kinds of phages isolated are highly analogous to the 2nd phage. Furthermore, the 2nd phage obtained in Example 2 and the two kinds of phages obtained in this Example were examined for bacteriolytic ability against Xanthomonas campestris pv. campestris. Consequently, all three kinds of phages exhibited bacteriolytic ability against this bacterial strain (FIGS. 15A-15B).

[0493] Additionally, these results suggest that the phage obtained in this Example is useful for control of shot hole disease of Prunus spp., rice leaf blight, orange bacterial canker, black rot disease of broccoli, and the like, which are caused by bacteria of the Xanthomonas genus.

### (5) Genomic Analysis of Phage

[0494] The genomic DNA sequence of the phage obtained in this Example was determined and analyzed.

### (i) Preparation and Sequencing of Genomic DNA of Phage

[0495] The genome of two kinds of phages was extracted using a TURBO DNA-free™ kit (Thermo Fisher Scientific Inc.). The basic operation was in accordance with the method described in “(5) Genomic Analysis of 1st Phage, (i) Preparation and Sequencing of Genomic DNA of 1st Phage” in Example 1.

(ii) Bioinformatics Analysis based on Genomic Sequence Information

[0496] On the basis of the genomic nucleotide sequences (SEQ ID NOs: 47 and 48) of the phages obtained in (i) above, and using GENETYX-NGS, the average nucleotide identity (ANI) to the genomic nucleotide sequence (SEQ ID NO: 13) of the 2nd phage was analyzed. As a result of the analysis, the average nucleotide identity (ANI) to SEQ ID NO: 13 was 98.90% for SEQ ID NO: 47 and 98.92% for SEQ ID NO: 48. Accordingly, the two kinds of phages obtained in this Example, are referred to as a “2nd phage” in addition to the phage obtained in Example 2.

[0497] To clarify the cause of the identity in host specificity between the phage isolated in this Example and the phage isolated in Example 2, the sequences of the tail fiber proteins of both phages were compared.

[0498] First, a tail fiber gene was identified from the genomic sequence of each of the two kinds of phages in this Example. The gene was identified utilizing a RAST server (https://rast.nmpdr.org/) and a PHASTER server (https://phaster.ca/). Consequently, the nucleotide sequence of SEQ ID NO: 46 was identified as the nucleotide sequence of the tail fiber gene. The nucleotide sequences of the tail fiber genes of the two kinds of phages isolated in this Example were the same.

[0499] Furthermore, the amino acid sequence (SEQ ID NO: 45) encoded by the gene consisting of the nucleotide sequence of SEQ ID NO: 46 was compared with the amino acid sequence (SEQ ID NO: 11) encoded by the tail fiber gene of the phage isolated in Example 2. Consequently, only the amino acid at position 154 was different. Specifically, threonine (Thr) at position 154 in SEQ ID NO: 11 was substituted with alanine (Ala).

[0500] In the relationship with the phage Xp12 having the highest analogous score to the phage isolated in Example 2, the amino acid sequence was different, in the same manner as with the phage isolated in Example 2, in the amino acid at position 278 and position 350 from the amino acid sequence of this analogous protein. In the phage obtained in this Example, the above-described amino acid at position 154 was additionally different.

[0501] As described above in Example 2, Xanthomonas oryzae is the only known bacterial species against which the phage Xp12 exhibits bacteriolytic ability, thus suggesting that the bacteriolytic ability against a wide variety of host, as the 2nd phage has, is due to a difference in the amino acid at position 278 and position 350 in the amino acid sequence of the tail fiber protein. Additionally, it has been suggested that even a phage having an additional different amino acid at another position, as the 2nd phage obtained in this Example, does have a wide host range.

### Example 12: Isolation of Novel 7th Bacteriophage, and Bacteriolytic Ability Thereof

### (Purpose)

[0502] The purpose is to isolate a novel bacteriophage having bacteriolytic ability against pathogenic bacteria of a plant disease, and verify the bacteriolytic ability against the plant pathogenic bacteria.

### (Methods and Results)

### (1) Obtainment and Culture of Plant Pathogenic Bacteria

[0503] In one or more embodiments of the present invention, the plant pathogenic bacteria as target bacteria were bacteria of the Xanthomonas genus, and all the bacterial strains were obtained from the National Agriculture and Food Research Organization (NARO). Besides the bacteria of the Xanthomonas genus used in Example 7 listed in Table 10, the bacteria used in this Example are listed in Table 15, together with the deposition numbering (MAFF No.) of the National Agriculture and Food Research Organization.

TABLE 15

| | | Source of | Place of |
|---|---|---|---|
| ID | Species | Isolation | Harvest |
| MAFF No. | Xanthomonas campestris | Pepper | Tokushima |
| 301260 | pv. vesicatoria | | |

[0504] As a control, a Pseudomonas fluorescens bacterial strain (NCIMB-ID: 10460), which is of Pseudomonas genus, was obtained from NCIMB, a laboratory in The United Kingdom National Culture Collection, UKNCC.

[0505] Bacteria of the Xanthomonas genus and Pseudomonas fluorescens were cultured in accordance with the method described in “(1) Obtainment and Culture of Plant Pathogenic Bacteria” in Example 1.

### (2) Isolation and Purification of Phage

[0506] A novel phage was isolated from natural dirty water or soil obtained in Japan. A method for isolation and a method for purification were in accordance with the methods described in “(2) Isolation and Purification of 1st Phage” in Example 1. Consequently, one kind of new phage was isolated from natural dirty water and soil.

[0507] The phage isolated was suspended in an SM Buffer, passed through a 0.2 μm filter, and collected in the form of a phage-containing solution. This phage-containing solution was mixed with the bacteria suspension under the above-described conditions to isolate a phage again. This procedure was repeated several times to purify the phage.

### (3) Amplification and Refinement of Phage

[0508] The phage isolated and purified was amplified and refined by a plate lysate (PL) method. Specific method was in accordance with the method described in “(3) Amplification and Refinement of 1st Phage” in Example 1. The titer of the refined solution of phage prepared was determined by a plaque assay method using a solution suitably diluted, and was confirmed to be 108 PFU/mL or more.

### (4) Evaluation of Host Range of Phage

[0509] The host range of the phage obtained was evaluated by a spot test method. The basic operation was in accordance with the method described in “(4) Evaluation of Host Range of 1st Phage” in Example 1.

[0510] One example of the results is shown in FIGS. 16A-16B and FIGS. 17A-17B. When the phage exhibited bacteriolytic ability, only the site where the refined solution of phage was dropped became clear in the bacterial lawn formed on the plate. The phage obtained in one or more embodiments of the present invention exhibited bacteriolytic ability against all the bacteria of the Xanthomonas genus shown in Table 10 (FIGS. 16A-16B). On the other hand, the phage did not exhibit bacteriolytic ability against Pseudomonas fluorescens. This suggests the possibility that the phage isolated are high analogous to the 7th phage. Furthermore, the two kinds of 7th phages obtained in Example 7 and the phage obtained in this Example were examined for bacteriolytic ability against Xanthomonas campestris pv. vesicatoria. Consequently, all three kinds of phages exhibited bacteriolytic ability against this bacterial strain (FIGS. 17A-17B).

[0511] Additionally, these results suggest that the phage obtained in this Example is useful for control of shot hole disease of Prunus spp. and black rot disease of broccoli, which are caused by bacteria of the Xanthomonas genus.

### (5) Genomic Analysis of 7th Phage

[0512] The genomic DNA sequence of the phage obtained in this Example was determined and analyzed.

### (i) Preparation and Sequencing of Genomic DNA of Phage

[0513] The genome of the phage was extracted using a TURBO DNA-free™ kit (Thermo Fisher Scientific Inc.). The basic operation was in accordance with the method described in “(5) Genomic Analysis of 1st Phage, (i) Preparation and Sequencing of Genomic DNA of 1st Phage” in Example 1.

(ii) Bioinformatics Analysis based on Genomic Sequence Information

[0514] On the basis of the genomic nucleotide sequence (SEQ ID NO: 53) of the phage obtained in (i) above, and using GENETYX-NGS, the average nucleotide identity (ANI) to the genomic nucleotide sequences (SEQ ID NOs: 28 and 29) of the 7th phage was analyzed. Consequently, the nucleotide sequence of SEQ ID NO: 53 had a sequence identity of 92.61% to the nucleotide sequence of SEQ ID NO: 28 in the range of 75.06%. On the other hand, the sequence identity was 92.19% to the nucleotide sequence SEQ ID NO: 29 over the range of 77.05%. It was unexpected that the genomic sequence identity was not extremely high.

[0515] To clarify the cause of the identity in host specificity between the phage isolated in this Example and the phage isolated in Example 7, the sequences of the tail tubular proteins of both phages were compared.

[0516] First, a gene group encoding a tail tubular protein was identified from the genomic sequence of the phage in this Example. The gene was identified utilizing a BRAST server (https://rast.nmpdr.org/) and a PHASTER server (https://phaster.ca/).

[0517] SEQ ID NO: 51 shows the nucleotide sequence of the tail tubular protein A gene comprised in the genomic nucleotide sequence (SEQ ID NO: 53) of the phage obtained in this Example, and SEQ ID NO: 49 shows the amino acid sequence of the tail tubular protein A. On the other hand, SEQ ID NO: 52 shows the nucleotide sequence of the tail tubular protein B gene, and SEQ ID NO: 50 shows the amino acid sequence of the tail tubular protein B.

[0518] Furthermore, the amino acid sequences (SEQ ID NOs: 49 and 50) of these tail tubular proteins were compared with the amino acid sequences (SEQ ID NO: 24 and 58) of the tail tubular proteins of the phages isolated in Example 7. Consequently, the sequence identity of the amino acid sequence of the tail tubular protein A was 96.58% and the sequence identity of the amino acid sequence of the tail tubular protein B was 97.60%. Accordingly, the phage obtained in this Example, is referred to as a “7th phage” in addition to the phage obtained in Example 7.

[0519] Specifically, as to the amino acid sequence of the tail tubular protein A, seven amino acid substitutions from the amino acid sequence of SEQ ID NO: 24 were observed in the amino acid sequence of SEQ ID NO: 49, as follows: the substitution of glutamic acid (Glu) with aspartic acid (Asp) at position 28, the substitution of serine (Ser) with asparagine (Asn) at position 108, the substitution of glutamine (Gln) with histidine (His) at position 110, the substitution of glutamine (Gln) with lysine (Lys) at position 153, the substitution of aspartic acid (Asp) with asparagine (Asn) at position 157, the substitution of tyrosine (Tyr) with phenyl alanine (Phe) at position 189, and the substitution of valine (Val) with tyrosine (Tyr) at position 201.

[0520] On the other hand, as to the amino acid sequence of the tail tubular protein B, 20 amino acid substitutions from the amino acid sequence of SEQ ID NO: 58 were observed in the amino acid sequence of SEQ ID NO: 50, as follows: the substitution of alanine (Ala) with proline (Pro) at position 25, the substitution of alanine (Ala) with serine (Ser) at position 53, the substitution of alanine (Ala) with proline (Pro) at position 216, the substitution of histidine (His) with tyrosine (Tyr) at position 221, the substitution of valine (Val) with (Ile) at position 272, the substitution of alanine (Ala) with glutamic acid (Glu) at position 389, the substitution of serine (Ser) with alanine (Ala) at position 395, the substitution of valine (Val) with isoleucine (Ile) at position 410, the substitution of isoleucine (Ile) with valine (Val) at position 425, the substitution of glycine (Gly) with alanine (Ala) at position 472, the substitution of alanine (Ala) with serine (Ser) at position 607, the substitution of isoleucine (Ile) with valine (Val) at position 623, the substitution of arginine (Arg) with serine (Ser) at position 662, the substitution of leucine (Leu) with glutamine (Gln) at position 670, the substitution of threonine (Thr) with asparagine (Asn) at position 699, the substitution of aspartic acid (Asp) with glycine (Gly) at position 707, the substitution of serine (Ser) with alanine (Ala) at position 757, the substitution of glycine (Gly) with serine (Ser) at position 763, the substitution of serine (Ser) with asparagine (Asn) at position 764, and the substitution of methionine (Met) with valine (Val) at position 765.

[0521] The relationship with the phages ΦXc10 and f20-Xaj having the highest analogous score to the amino acid sequences of the tail tubular proteins of the phages isolated in Example 7 was examined. Consequently, as to the tail tubular protein A, SEQ ID NOs: 24 and 49 are encompassed in the amino acid sequence of SEQ ID NO: 60, but there was no known phage encompassed in the amino acid sequence of SEQ ID NO: 60, including ΦXc10 and f20-Xaj. Additionally, as to the tail tubular protein B, SEQ ID NOs: 58 and 50 are encompassed in the amino acid sequence of SEQ ID NO: 61, but there was no known phage encompassed in the amino acid sequence of SEQ ID NO: 61, including ΦXc10 and f20-Xaj.

[0522] As described above in Example 7, the phages ΦXc10, f20-Xaj, and the like were not phages exhibiting bacteriolytic ability against Xanthomonas arboricola pv. pruni and the like, thus suggesting that the bacteriolytic ability peculiar to the 7th phage is due to a difference in the amino acid sequence of the tail tubular protein. Additionally, it has been suggested that even if the amino acid sequence of the tail tubular protein has a little difference as in the 7th phage obtained in this Example, the phage has the same host range, depending on the position of the difference.

### Example 13: Isolation of Novel 9th Bacteriophage, and Bacteriolytic Ability Thereof

### (Purpose)

[0523] The purpose is to isolate a novel bacteriophage having bacteriolytic ability against pathogenic bacteria of a plant disease, and verify the bacteriolytic ability against the plant pathogenic bacteria.

### (Methods and Results)

### (1) Obtainment and Culture of Plant Pathogenic Bacteria

[0524] In one or more embodiments of the present invention, the plant pathogenic bacteria as target bacteria were bacteria of the Xanthomonas genus, and all the bacterial strains were obtained from the National Agriculture and Food Research Organization (NARO). In this Example, the bacteria of the Xanthomonas genus listed in Table 13 were used.

[0525] As a control, a Pseudomonas fluorescens bacterial strain (NCIMB-ID: 10460) that is reported to have a plant growth promoting action and the like, and is beneficial to the environment was obtained from NCIMB, a laboratory in The United Kingdom National Culture Collection, UKNCC.

[0526] Each of bacteria of the Xanthomonas genus and Pseudomonas fluorescens were cultured in accordance with the method described in “(1) Obtainment and Culture of Plant Pathogenic Bacteria” in Example 1.

### (2) Isolation and Purification of Phage

[0527] A novel phage was isolated from natural dirty water, soil, or part of a plant (leaf) obtained in Japan. A method for isolation and a method for purification were in accordance with the methods described in “(2) Isolation and Purification of 1st Phage” in Example 1. Consequently, one kind of new phage was isolated from natural dirty water or soil or water having part of a plant immersed therein.

[0528] The phage isolated was suspended in an SM Buffer, passed through a 0.2 μm filter, and collected in the form of a phage-containing solution. This phage-containing solution was mixed with the bacteria suspension under the above-described conditions to isolate a phage again. This procedure was repeated several times to purify the phage.

### (3) Amplification and Refinement of Phage

[0529] The phage isolated and purified was amplified and refined by a plate lysate (PL) method. Specific method was in accordance with the method described in “(3) Amplification and Refinement of 1st Phage” in Example 1. The titer of the refined solution of phage prepared was determined by a plaque assay method using a solution suitably diluted, and was confirmed to be 108 PFU/mL or more.

### (4) Evaluation of Host Range of Phage

[0530] The host range of the phage obtained was evaluated by a spot test method. The basic operation was in accordance with the method described in “(4) Evaluation of Host Range of 1st Phage” in Example 1.

[0531] One example of the results is shown in FIGS. 18A-18B. When the phage exhibited bacteriolytic ability, only the site where the refined solution of phage was dropped became clear in the bacterial lawn formed on the plate. The phage obtained in the Example exhibited bacteriolytic ability against all the bacterial strains belonging to the three species of bacteria: Xanthomonas arboricola, Xanthomonas citri, and Xanthomonas campestris as with the phages obtained in Example 9 (FIGS. 18A-18B). Additionally, it has been verified that the phages exhibit bacteriolytic ability against bacterial strains of different pathovars. On the other hand, it has also been verified that the phage does not exhibit bacteriolytic ability against Pseudomonas fluorescens. This suggests the possibility that the phage isolated is highly analogous to the 9th phage.

[0532] Additionally, these results suggest that the phage obtained in this Example is useful for control of, for example, shot hole disease of Prunus spp., orange bacterial canker, black rot disease of broccoli, and the like, which are caused by bacteria of the Xanthomonas genus.

### (5) Genomic Analysis of Phage

[0533] The genomic DNA sequence of the phage obtained was determined and analyzed.

### (i) Preparation and Sequencing of Genomic DNA of Phage

[0534] The genome of the phage was extracted using a TURBO DNA-free™ kit (Thermo Fisher Scientific Inc.). The basic operation was in accordance with the method described in “(5) Genomic Analysis of 1st Phage, (i) Preparation and Sequencing of Genomic DNA of 1st Phage” in Example 1.

(ii) Bioinformatics Analysis based on Genomic Sequence Information

[0535] On the basis of the genomic nucleotide sequence (SEQ ID NO: 56) of the phage obtained in (i) above, and using GENETYX-NGS, the average nucleotide identity (ANI) to the genomic nucleotide sequence (SEQ ID NO: 41) of the 9th phage was analyzed. Consequently, the nucleotide sequence of SEQ ID NO: 56 had a sequence identity of 92.61% to the nucleotide sequence of SEQ ID NO: 41 in the range of 75.06%. It was unexpected that the genomic sequence identity was not extremely high.

[0536] To clarify the cause of the identity in host specificity between the phage isolated in this Example and the phage isolated in Example 9, the sequences of the tail tubular proteins of both phages were compared.

[0537] First, a gene group encoding a tail tubular protein was identified from the genomic sequence of the phage in this Example. The gene was identified utilizing a BRAST server (https://rast.nmpdr.org/) and a PHASTER server (https://phaster.ca/).

[0538] The nucleotide sequence of the tail tubular protein A gene, comprised in the genomic nucleotide sequence (SEQ ID NO: 56) of the phage obtained in this Example, was completely the same as the nucleotide sequence (SEQ ID NO: 39) of the tail tubular protein A gene of the phage isolated in Example 9. Accordingly, the amino acid sequence of the tail tubular protein A resulting from the translation was the same as the amino acid sequence (SEQ ID NO: 37) of the tail tubular protein A of the phage isolated in Example 9. Therefore, the phage obtained in this Example, is referred to as a “9th phage” in addition to the phage obtained in Example 9.

[0539] On the other hand, SEQ ID NO: 55 shows the nucleotide sequence of the tail tubular protein B gene, and SEQ ID NO: 54 shows the amino acid sequence of the tail tubular protein B.

[0540] Furthermore, the amino acid sequence (SEQ ID NO: 54) of the tail tubular protein B was compared with the amino acid sequence (SEQ ID NO: 38) of the tail tubular protein B of the phages isolated in Example 9. The sequence identity of the amino acid sequence of the tail tubular protein B was 99.3%. Specifically, six amino acid substitutions from the amino acid sequence of SEQ ID NO: 38 in the amino acid sequence of SEQ ID NO: 54 were observed as follows: the substitution of threonine (Thr) with alanine (Ala) at position 61, the substitution of glutamine (Gln) with lysine (Lys) at position 108, the substitution of proline (Pro) with glutamine (Gln) at position 404, the substitution of proline (Pro) with serine (Ser) at position 679, the substitution of threonine (Thr) with alanine (Ala) at position 682, and the substitution of isoleucine (Ile) with valine (Val) at position 727.

[0541] As described above in Example 9, there was no known phage having a sequence identity of 97% or more to the amino acid sequences of the tail tubular proteins A and B of the 9th phage obtained in Example 9. Additionally, it has not been known that the phage Xanthomonas phage Xaa_vB_phi31 and the like that made a high analogous score to the 9th phage exhibit bacteriolytic ability against a wide range of various bacterial species of Xanthomonas genus as with the 9th phage. This suggests that the wide bacteriolytic ability of the 9th phage is due to a difference in the amino acid sequence of the tail tubular protein. Additionally, it has been suggested that even if the amino acid sequence of the tail tubular protein has a little difference, as in the 9th phage obtained in this Example, the phage has the same host range.

### Example 14: Bacteriolytic Ability of Combination of Bacteriophages Obtained

### (Purpose)

[0542] The purpose is to examine how novel bacteriophages shown to have bacteriolytic ability against the pathogenic bacteria of a plant disease when used alone have an effect on the plant disease when used in combination.

### (Method)

### (1) Spot Test Method

[0543] A spot test was performed in accordance with the method described in “(4) Evaluation of Host Range of 1st Phage” in Example 1. In this Example, a bacterial strain of Xanthomonas arboricola pv. pruni (MAFF No. 311351), against which all the phages tested were confirmed to have bacteriolytic ability, was used.

[0544] As a refined solution of phage to be dropped, a solution mixture obtained by mixing equal amounts of the refined solutions of phage prepared in each Example was used. The solution mixture was prepared by being suitably diluted so that the total titer could be the same as when the solution was used alone. The phages used in this Example are as below.

[0545] In this Example, each of the following phages is used: the phage having the genomic DNA sequence of SEQ ID NO: 8 as the 1st phage, the phage with the genomic DNA sequence of SEQ ID NO: 13 as the 2nd phage, the phage with the genomic DNA sequence of SEQ ID NO: 14 as the 3rd phage, the phage with the genomic DNA sequence of SEQ ID NO: 17 as the 4th phage, the phage with the genomic DNA sequence of SEQ ID NO: 18 as the 5th phage, the phage with the genomic DNA sequence of SEQ ID NO: 23 as the 6th phage, the phage with the genomic DNA sequence of SEQ ID NO: 28 as the 7th phage, the phage with the genomic DNA sequence of SEQ ID NO: 32 as the 8th phage, the phage with the genomic DNA sequence of SEQ ID NO: 41 as the 9th phage, and the phage with the genomic DNA sequence of SEQ ID NO: 44 as the 10th phage.

### (Results)

[0546] One example of the results is shown in FIGS. 19A-19B and FIGS. 20A-20B. When a combination of the phages exhibited bacteriolytic ability, only the site where the refined solution of phage was dropped became clear in the bacterial lawn formed on the plate. Using any of the combinations of two kinds, five kinds, and eight kinds tested has been revealed to exhibit bacteriolytic ability at least in the same manner as using each phage alone (FIGS. 19A-19B and FIGS. 20A-20B).

[0547] The results have verified that phages of one or more embodiments of the present invention are useful when used in combination as well as when used alone.

### Example 15: Disease Control Effect Test on Shot Hole Disease of Prunus spp.

### (Purpose)

[0548] The purpose is to examine how isolated novel bacteriophages with bacteriolytic ability against the pathogenic bacteria of a plant disease have an effect on the plant disease when applied to a plant.

### (Method)

### (1) Preparation of Spreading Solution of Phage

[0549] A spreading solution of phage used in this test was prepared in accordance with the following procedure.

[0550] First, a bacterial cell culture solution of host bacteria for amplifying phages was prepared in accordance with the following procedure. As the host, a bacterial strain of Xanthomonas arboricola pv. pruni (MAFF No. 311351), against which all the phages tested were confirmed to have bacteriolytic ability, was used. The bacterial cell of this strain was inoculated into YPG Broth and incubated overnight with a shaker set at 25° C. After the incubation, OD₆₀₀ (a turbidity at a wavelength of 600 nm) was measured, and a bacterial cell culture solution, the turbidity of which became approximately 1.0, was used below.

[0551] The bacterial cell culture solution prepared and a refined solution of phage containing one kind of phage (having a titer of approximately 108 PFU/mL) prepared in each of Examples 1 to 13 were mixed in equal amounts. The resulting mixture solution was inoculated into a 100-fold amount of YPG culture solution and incubated for approximately 8 to 12 hours with a shaker set at 25° C. The resulting culture solution was collected as a crude solution of phage. To the crude solution collected, a 1/10 amount of chloroform was added, stirred vigorously, and then centrifuged under 8,000×g at 20° C. for 5 minutes. The supernatant was then collected. The collected supernatant was passed through a 0.2 μm filter, and the resulting filtrate was used as a refined solution of phage.

[0552] As a spreading solution of phage comprising one kind of phage, a refined solution of phage diluted with sterile tap water so as to have a titer of approximately 10⁹ PFU/mL was used.

[0553] For a spreading solution of phage comprising a plurality of kinds of phages, refined solutions of phage adjusted so as to each have a titer at the same level (order), mixed in equal amounts, and diluted with sterile tap water so as to have a titer of approximately 10⁹ PFU/mL were used. Each of the following phages is used: the phage with the genomic DNA sequence of SEQ ID NO: 8 as the 1st phage, the phage with the genomic DNA sequence of SEQ ID NO: 13 as the 2nd phage, the phage with the genomic DNA sequence of SEQ ID NO: 14 as the 3rd phage, the phage with the genomic DNA sequence of SEQ ID NO: 17 as the 4th phage, the phage with the genomic DNA sequence of SEQ ID NO: 18 as the 5th phage, the phage with the genomic DNA sequence of SEQ ID NO: 23 as the 6th phage, the phage with the genomic DNA sequence of SEQ ID NO: 28 as the 7th phage, and the phage with the genomic DNA sequence of SEQ ID NO: 32 as the 8th phage.

### (2) Preparation of Spreading Solution of Bacteria

[0554] To prepare a spreading solution of bacteria used to infect a plant in this test, the bacterial cell culture solution prepared in (1) was used. A bacterial cell culture solution diluted approximately 10,000-fold with sterile tap water was applied to a YPG Agar plate, and incubated for approximately 1 to 3 days in an incubator set at 25° C. A bacterial cell suspension, in which the colony on the YPG Agar plate was collected by suspending in sterile tap water, was diluted with sterile tap water so as a final OD₆₀₀ to be approximately 0.5, and the resulting solution was used as a spreading solution of bacteria.

### (3) Plant Specimen

[0555] A commercially available peach seedling (the breed: Kawanakajima, one-year old) was grown in a greenhouse, and the seedling grown to have approximately 100 leaves was used as a specimen for evaluation.

### (4) Application and Infection of Phage

[0556] With the phage-applied group, foliar application of the spreading solution of phage to each specimen was performed twice each, twice at intervals of 2 to 3 days, before and after the bacterial infection, and was followed by foliar application of the spreading solution of bacteria 2 to 3 days later, whereby the specimen was infected with the bacteria. Over an approximately 2-day period after the infection treatment, the specimen infected with the bacteria was left in a vinyl house with a high humidity being kept. Then, another foliar application of the spreading solution of phage, twice with an interval of two to three days, was performed again. For a nontreated group, the same procedure as described above was performed except that sterile tap water was used instead of a refined solution of phage.

### (5) Measurement of Incidence Rate

[0557] When a certain incidence of disease was verified with the nontreated group after one week or more from the infection treatment, the nontreated group and each phage-applied group were examined for the incidence rate.

[0558] A leaf, on the face of which a brown spot characteristic of a shot hole disease of Prunus spp. was developed, was judged as a diseased leaf. The ratio of the number of diseased leaves out of the number of all the leaves was calculated as an incidence rate. The relative incidence rate of the phage-applied group was calculated as a relative value, with the incidence rate of the nontreated group assumed to be 100%.

### (Results)

[0559] The results are shown in FIGS. 21 and 22. The incidence rate of the nontreated group was approximately 36%. On the other hand, the relative incidence rate, with the incidence rate of the nontreated group assumed to be 100%, was approximately 50% on average when the spreading solution of phage comprising one kind of phage was applied. When the phage was applied, even the highest relative incidence rate was approximately 61% (with the phage-applied group for the 6th phage and the phage-applied group for the 8th phage). On the other hand, the relative incidence rate was the lowest, approximately 24%, with the phage-applied group for the 7th phage.

[0560] Furthermore, when the spreading solution of phage comprising two kinds or more of phages was applied, the incidence rate was further decreased, compared to the case when the spreading solution of phage comprising one kind of phage was applied. Here, the incidence rate of the nontreated group was approximately 15%. When phages were applied in combination (a combination of the 2nd phage, 4th phage, 6th phage, and 8th phage), even the highest relative incidence rate was approximately 41%. On the other hand, the relative incidence rate was the lowest, approximately 34%, with a combination of the 1st phage and the 2nd phage.

[0561] The results have revealed that, even when applied to an actual plant, a phage of one or more embodiments of the present invention can effectively control the plant away from a disease. Additionally, applying the phages in combination has been revealed to afford a higher effect. Furthermore, it has been revealed that the disease control effect of a phage of one or more embodiments of the present invention is also effective under conditions where the incidence rate in the nontreated group is low.

[0562] Common plant protectives comprising antibiotics cause drug poisoning in a leaf, such as the etiolation of a leaf apex, in some cases. However, in the phage-applied group, there was no significant adverse effect found on any plant that could be attributed to the phage, for example, such drug poisoning as appears on the leaf. This has revealed that applying a phage of one or more embodiments of the present invention is an effective disease control means with a smaller side effect.

### Example 16: Disease Control Effect Test on Black Rot Disease of Broccoli

### (Purpose)

[0563] The purpose is to examine how isolated novel bacteriophages with bacteriolytic ability against the pathogenic bacteria of a plant disease have an effect on the plant disease when applied to a plant.

### (Method)

### (1) Preparation of Spreading Solution of Phage

[0564] A spreading solution of phage was prepared in accordance with Example 15, except that the bacteria used as a bacterial cell was Xanthomonas campestris pv. campestris (MAFF No. 106765), and that the below-described phages were used.

[0565] The phages used in this Example were as follows: the phage with the genomic DNA sequence of SEQ ID NO: 7 (Φ1 in FIG. 23) as the 1st phage, the phage with the genomic DNA sequence of SEQ ID NO: 13 (Φ2-1 in FIG. 23) and the phage with the genomic DNA sequence of SEQ ID NO: 47 (Φ2-2 in FIG. 23) as the 2nd phages, the phage with the genomic DNA sequence of SEQ ID NO: 28 (Φ7-1 in FIG. 23) and the phage with the genomic DNA sequence of SEQ ID NO: 53 (Φ7-2 in FIG. 23) as the 7th phages, the phage with the genomic DNA sequence of SEQ ID NO: 41 (Φ9 in FIG. 23) as the 9th phage, and the phage with the genomic DNA sequence of SEQ ID NO: 44 (Φ10 in FIG. 23) as the 10th phage, respectively.

### (2) Preparation of Spreading Solution of Bacteria

[0566] A spreading solution of phage was prepared in accordance with Example 15, except that the bacterial cells were the above-described bacteria.

### (3) Plant Specimen

[0567] Commercially available seeds of broccoli were seeded, and grown in a greenhouse. A seedling grown to have five or more leaves was used as a specimen for evaluation.

### (4) Application and Infection of Phage

[0568] This was performed in accordance with Example 15.

### (5) Measurement of Incidence Rate

[0569] This was performed the same as in Example 15, except that an evaluation was made 16 days after the infection treatment.

### (Results)

[0570] The results are shown in FIG. 23. The incidence rate of the nontreated group was approximately 52%. On the other hand, the relative incidence rate, with the incidence rate of the nontreated group assumed to be 100%, was approximately 62% on average when the spreading solution of phage comprising one kind of phage was applied. When the phage was applied, even the highest relative incidence rate was approximately 66% (with the group to which the phage with the genomic DNA sequence of SEQ ID NO: 28 (Φ7-1 in FIG. 23) was applied as the 7th phage). On the other hand, the relative incidence rate was the lowest, approximately 56%, with the group to which the phage having the genomic DNA sequence of SEQ ID NO: 47 was applied as the 2nd phage (Φ2-2 in FIG. 23).

[0571] These results have verified that the 9th phage and the 10th phage exhibit bacteriolytic ability even when the specific bacterial strain was different from a bacterial strain belonging to Xanthomonas campestris pv. campestris, bacteriolytic ability against which was verified in Examples 9 and 10, respectively.

[0572] Furthermore, when the spreading solution of phage comprising two kinds or more of phages was applied, the incidence rate was further decreased to approximately 53% on average. The highest relative incidence rate was approximately 58% when a combination of the 9th phage (Φ9 in FIG. 23) and the 10th phage (Φ10 in FIG. 23) was used. On the other hand, when a total of four kinds of phages, the 1st phage (Φ1 in FIG. 23), two kinds of 2nd phages (Φ2-1 and Φ2-2 in FIG. 23), and the 10th phage (Φ10 in FIG. 23), were used in combination, the relative incidence rate was the lowest, approximately 47%.

[0573] The results have revealed that, even when applied to an actual plant, a phage of one or more embodiments of the present invention can effectively control the plant away from a disease, regardless of the kind of the plant itself. Additionally, applying the phages of one or more embodiments of the present invention in combination has been revealed to afford a higher effect.

[0574] In the phage-applied group, there was no significant adverse effect found on any plant that could be attributed to the phage, such as drug poisoning found in a leaf. This has revealed that applying a phage of one or more embodiments of the present invention is an effective disease control means with a smaller side effect.

### Example 17: Disease Control Effect Test on Bacterial Spot Disease of Tomato

### (Purpose)

[0575] The purpose is to examine how novel isolated bacteriophages with bacteriolytic ability against the pathogenic bacteria of a plant disease have an effect on the plant disease when applied to a plant.

### (Method)

### (1) Preparation of Spreading Solution of Phage

[0576] A spreading solution of phage was prepared in accordance with Example 15, except that the bacteria used as a bacterial cell was Xanthomonas campestris pv. vesicatoria (MAFF No. 301256), and that the below-described phages were used.

[0577] The phages used in this Example were as follows: the phage with the genomic DNA sequence of SEQ ID NO: 7 (Φ1 in FIG. 24) as the 1st phage, the phage with the genomic DNA sequence of SEQ ID NO: 13 (Φ2-1 in FIG. 24), the phage with the genomic DNA sequence of SEQ ID NO: 47 (Φ2-2 in FIG. 24), and the phage with the genomic DNA sequence of SEQ ID NO: 48 (Φ2-3 in FIG. 24) as the 2nd phages, the phage with the genomic DNA sequence of SEQ ID NO: 28 (Φ7 in FIG. 24) as the 7th phage, and the phage with the genomic DNA sequence of SEQ ID NO: 44 (Φ10 in FIG. 24) as the 10th phage, respectively.

### (2) Preparation of Spreading Solution of Bacteria

[0578] A spreading solution of phage was prepared in accordance with Example 15, except that the bacterial cells were the above-described bacteria.

### (3) Plant Specimen

[0579] Commercially available seeds of tomatoes were seeded and grown in a greenhouse. A seedling grown to have 50 or more leaves was used as a specimen for evaluation.

### (4) Application and Infection of Phage

[0580] This was performed in accordance with Example 15.

### (5) Measurement of Incidence Rate

[0581] This was performed the same as in Example 15, except that an evaluation was made 16 days after the infection treatment.

### (Results)

[0582] The results are shown in FIG. 24. The incidence rate of the nontreated group was approximately 25%. On the other hand, the relative incidence rate, with the incidence rate of the nontreated group assumed to be 100%, was approximately 60% on average when the spreading solution of phage comprising one kind of phage was applied. When the phage was applied, even the highest relative incidence rate was approximately 66% (with the group to which the phage with the genomic DNA sequence of SEQ ID NO: 47 (Φ2-2 in FIG. 24) was applied as the 2nd phage). On the other hand, the relative incidence rate was the lowest, approximately 53%, with the group to which the 7th phage (Φ7 in FIG. 24) was applied.

[0583] These results have verified that the 7th phage and the 10th phage exhibit bacteriolytic ability even when the specific bacterial strain was different from a bacterial strain belonging to Xanthomonas campestris pv. vesicatoria, bacteriolytic ability against which was verified in Examples 12 and 10, respectively.

[0584] Furthermore, when the spreading solution of phage comprising two or more kinds of phages was applied, the incidence rate was further decreased to approximately 49% on average. The highest relative incidence rate was approximately 55% when a combination of the phage with the genomic DNA sequence of SEQ ID NO: 48 (Φ2-3 in FIG. 24) as the 2nd phage and the 7th phage (Φ7 in FIG. 24) was used. On the other hand, when a total of four kinds of phages, the 1st phage (Φ1 in FIG. 24), two kinds of 2nd phages (Φ2-1 and Φ2-2 in FIG. 24), and the 10th phage (Φ10 in FIG. 24), were used in combination, the relative incidence rate was the lowest, approximately 43%.

[0585] The results have revealed that, even when applied to an actual plant, a phage of one or more embodiments of the present invention can effectively control the plant away from a disease, regardless of the kind of the plant itself. Additionally, applying the phages in one or more embodiments of the present invention of combination has been revealed to afford a higher effect.

[0586] In the applied-phage group, there was no significant adverse effect found on any plant that could be attributed to the phage, such as drug poisoning found in a leaf. This has revealed that applying a phage of one or more embodiments of the present invention is an effective disease control means with a smaller side effect.

[0587] All publications, patents, and patent applications cited herein are incorporated herein by reference in their entirety.

[0588] Although the disclosure has been described with respect to only a limited number of embodiments, those skilled in the art, having benefit of this disclosure, will appreciate that various other embodiments may be devised without departing from the scope of the present disclosure. Accordingly, the scope of the invention should be limited only by the attached claims.

The application's sequence listing, which the Patent Office published only in electronic form, follows.

SEQUENCE LISTING (61 sequences)

SEQ ID NO: 1 - protein, 1371 aa, unidentified
  REGION 1..1371: note = the amino acid sequence of tail fiber of bacteriophages
  VARIANT 121: note = Xaa is Ala or Ser
  VARIANT 123: note = Xaa is Ser or Thr
  VARIANT 125: note = Xaa is Ala or Thr
  VARIANT 146: note = Xaa is Ala or Thr
  VARIANT 262: note = Xaa is Ala or Ser
  VARIANT 646: note = Xaa is Asn or Thr
  VARIANT 679: note = Xaa is Leu or Met
  VARIANT 684: note = Xaa is Ser or Thr
  VARIANT 706: note = Xaa is Leu or Ile
  VARIANT 735: note = Xaa is Ala or Thr
  VARIANT 746: note = Xaa is Ser or Thr
  VARIANT 807: note = Xaa is Ser or Thr
  VARIANT 1020: note = Xaa is Asn or Ser
  VARIANT 1021: note = Xaa is Asp or Ser
  VARIANT 1022: note = Xaa is Asn or Thr
  VARIANT 1023: note = Xaa is Gly or Gln
  VARIANT 1024: note = Xaa is Ala or Glu
  VARIANT 1025: note = Xaa is Thr or Val
  VARIANT 1026: note = Xaa is Ile or Thr
  VARIANT 1027: note = Xaa is Ile or Val
  VARIANT 1030: note = Xaa is Asp or Asn
  VARIANT 1032: note = Xaa is Glu or Thr
  VARIANT 1033: note = Xaa is Leu or Met
  VARIANT 1055: note = Xaa is Ala or Val
  VARIANT 1076: note = Xaa is Ile or Val
  VARIANT 1082: note = Xaa is Gly or Ser
  VARIANT 1089: note = Xaa is Ala or Gly
  VARIANT 1093: note = Xaa is Ala or Gly
  VARIANT 1107: note = Xaa is Ala or Asn
  VARIANT 1111: note = Xaa is Ile or Leu
  VARIANT 1119: note = Xaa is Ala or Gly
  VARIANT 1121: note = Xaa is Ala or Ser
  VARIANT 1122: note = Xaa is Met or Val
  VARIANT 1124: note = Xaa is Ala or Pro
  VARIANT 1159: note = Xaa is Met or Val
  VARIANT 1160: note = Xaa is Ala or Gly
  VARIANT 1194: note = Xaa is Thr or Tyr
  VARIANT 1206: note = Xaa is Cys or Val
  VARIANT 1212: note = Xaa is Gly or Asn
MASIKPLYINAAGLEAQAASGDTVPVDYGGTGLSSLTANSYLRAVSSSAFELRTPAQVLADIGALSTTGTAASATILATARTINGTSFNGSANITTSTWGTARTLTIGSTGKSVNGSANVXWXLXEIGAAPTVHTHVSADITDLQXQLSGRVQRGTLQLNPDGTAPATFFNEVSDTLALKYSNNSTGSTGYPTEFGATLSVIMEKQSTRSFDLHMPTNSANNLYFRGYSSAGTPTDWKTIGALQNTNTWTAKQTFAGGANMXNDVLLEYGSGGATIRGSSTGSIILASGAAAGAGIRLRPNGDTSLTGQVAIDTDGIVVATGFSGPLTGNATTATTLATARTINGTSFNGSANITTANWGTARTLTIGGTGKSVNGSANVAWSLAEIGAASADDMLLIGGDNQIGNGNFYTGTATGWSGGSGSIGSGTAVRSIVDSTLASTGKAYRMDIANLPTAGYIEIISNTNVKIARVQGGERAVVAAYARGSAGVRVFLQIRWNDETGAAISYTGTPNNSSYLTSETWTKYTYSATAPTNAVSANLYVRVYGNTAADQWFETSHISMQVGNVSTGYAPSIDELRNDFNNLITTPNVWNQLQTFNGGWTLPNNKMGLLGTGGGSIRGTDTGSVVLSSGTGGSGFIYVRPNGDXSTSFQTVFYATGNVDMPTVRAGASTPNAAGAVXLELVXERSWQFRQRNTGATTQLELFDXTGAKDFVLSNTSNTNVIVMNPTNSSISAXTFTGALTGNAXTATTLATARTINGTSFNGSANITTSLWGTARNITIGSTTKSVNGSANVSWTLAEIGAVDAXGFVKKVGDTMSGDLTVSANVSGQMVRAGFSADLAFAQVRTLGDGSSIVWWESILKSSGGPGGESWYRAKSHVWTNDQGNISATLDTSGTFTAYNVLAAKSFSVTDSTATSLIQGNLAINDSLNARGVMYFGGKVANTGNKLRILNPDSSTSLRIDAVTADASAFAQMNFYASQFTFIVGRIGFNGHLNSTATAAVLSAQNGGTVYLRPNGADXXXXXXXXGTXGXXNVSGSIRLGGNGRNIRLYDNNXDTACVDIGSGIGTGTDRGGYXINRNAXGELSLWXRNGXVQLRLGLRDGVAGXVAQXNVPMLFSXPXXDXGNAATWSILTTGSYGGGIGMRDNAGSGNYFGGMYXXSGQMYIGCGAPNEAGIRASVVIKNDYQWYFTGNXINIEGSSPTIRXYDNDQXYTSWIHHNDGNHGFLAHNSFSWACFRNSGNDWQCQNNIIAYASDRRLKKNIVDAPNDIIEHFFENVRIRQFDWDEEKIAHYKVGIKARVGEVGAVAQEMQAVYSDAVAVNEAHNQIKTKDNPNPLKPDFLTIDWTKTVPLLIAEVQNLRRRVAQLENRA

SEQ ID NO: 2 - protein, 1371 aa, unidentified
  REGION 1..1371: note = the amino acid sequence of tail fiber of a bacteriophage
MASIKPLYINAAGLEAQAASGDTVPVDYGGTGLSSLTANSYLRAVSSSAFELRTPAQVLADIGALSTTGTAASATILATARTINGTSFNGSANITTSTWGTARTLTIGSTGKSVNGSANVAWSLTEIGAAPTVHTHVSADITDLQTQLSGRVQRGTLQLNPDGTAPATFFNEVSDTLALKYSNNSTGSTGYPTEFGATLSVIMEKQSTRSFDLHMPTNSANNLYFRGYSSAGTPTDWKTIGALQNTNTWTAKQTFAGGANMANDVLLEYGSGGATIRGSSTGSIILASGAAAGAGIRLRPNGDTSLTGQVAIDTDGIVVATGFSGPLTGNATTATTLATARTINGTSFNGSANITTANWGTARTLTIGGTGKSVNGSANVAWSLAEIGAASADDMLLIGGDNQIGNGNFYTGTATGWSGGSGSIGSGTAVRSIVDSTLASTGKAYRMDIANLPTAGYIEIISNTNVKIARVQGGERAVVAAYARGSAGVRVFLQIRWNDETGAAISYTGTPNNSSYLTSETWTKYTYSATAPTNAVSANLYVRVYGNTAADQWFETSHISMQVGNVSTGYAPSIDELRNDFNNLITTPNVWNQLQTFNGGWTLPNNKMGLLGTGGGSIRGTDTGSVVLSSGTGGSGFIYVRPNGDNSTSFQTVFYATGNVDMPTVRAGASTPNAAGAVMLELVSERSWQFRQRNTGATTQLELFDLTGAKDFVLSNTSNTNVIVMNPTNSSISATTFTGALTGNATTATTLATARTINGTSFNGSANITTSLWGTARNITIGSTTKSVNGSANVSWTLAEIGAVDATGFVKKVGDTMSGDLTVSANVSGQMVRAGFSADLAFAQVRTLGDGSSIVWWESILKSSGGPGGESWYRAKSHVWTNDQGNISATLDTSGTFTAYNVLAAKSFSVTDSTATSLIQGNLAINDSLNARGVMYFGGKVANTGNKLRILNPDSSTSLRIDAVTADASAFAQMNFYASQFTFIVGRIGFNGHLNSTATAAVLSAQNGGTVYLRPNGADSDTGATIIGTNGEMNVSGSIRLGGNGRNIRLYDNNADTACVDIGSGIGTGTDRGGYIINRNAGGELSLWARNGGVQLRLGLRDGVAGAVAQLNVPMLFSAPAMDPGNAATWSILTTGSYGGGIGMRDNAGSGNYFGGMYVGSGQMYIGCGAPNEAGIRASVVIKNDYQWYFTGNTINIEGSSPTIRVYDNDQGYTSWIHHNDGNHGFLAHNSFSWACFRNSGNDWQCQNNIIAYASDRRLKKNIVDAPNDIIEHFFENVRIRQFDWDEEKIAHYKVGIKARVGEVGAVAQEMQAVYSDAVAVNEAHNQIKTKDNPNPLKPDFLTIDWTKTVPLLIAEVQNLRRRVAQLENRA

SEQ ID NO: 3 - protein, 1371 aa, unidentified
  REGION 1..1371: note = the amino acid sequence of tail fiber of a bacteriophage
MASIKPLYINAAGLEAQAASGDTVPVDYGGTGLSSLTANSYLRAVSSSAFELRTPAQVLADIGALSTTGTAASATILATARTINGTSFNGSANITTSTWGTARTLTIGSTGKSVNGSANVAWSLTEIGAAPTVHTHVSADITDLQTQLSGRVQRGTLQLNPDGTAPATFFNEVSDTLALKYSNNSTGSTGYPTEFGATLSVIMEKQSTRSFDLHMPTNSANNLYFRGYSSAGTPTDWKTIGALQNTNTWTAKQTFAGGANMSNDVLLEYGSGGATIRGSSTGSIILASGAAAGAGIRLRPNGDTSLTGQVAIDTDGIVVATGFSGPLTGNATTATTLATARTINGTSFNGSANITTANWGTARTLTIGGTGKSVNGSANVAWSLAEIGAASADDMLLIGGDNQIGNGNFYTGTATGWSGGSGSIGSGTAVRSIVDSTLASTGKAYRMDIANLPTAGYIEIISNTNVKIARVQGGERAVVAAYARGSAGVRVFLQIRWNDETGAAISYTGTPNNSSYLTSETWTKYTYSATAPTNAVSANLYVRVYGNTAADQWFETSHISMQVGNVSTGYAPSIDELRNDFNNLITTPNVWNQLQTFNGGWTLPNNKMGLLGTGGGSIRGTDTGSVVLSSGTGGSGFIYVRPNGDTSTSFQTVFYATGNVDMPTVRAGASTPNAAGAVLLELVTERSWQFRQRNTGATTQLELFDITGAKDFVLSNTSNTNVIVMNPTNSSISAATFTGALTGNASTATTLATARTINGTSFNGSANITTSLWGTARNITIGSTTKSVNGSANVSWTLAEIGAVDASGFVKKVGDTMSGDLTVSANVSGQMVRAGFSADLAFAQVRTLGDGSSIVWWESILKSSGGPGGESWYRAKSHVWTNDQGNISATLDTSGTFTAYNVLAAKSFSVTDSTATSLIQGNLAINDSLNARGVMYFGGKVANTGNKLRILNPDSSTSLRIDAVTADASAFAQMNFYASQFTFIVGRIGFNGHLNSTATAAVLSAQNGGTVYLRPNGADNSNQEVTVGTDGTLNVSGSIRLGGNGRNIRLYDNNVDTACVDIGSGIGTGTDRGGYVINRNASGELSLWGRNGAVQLRLGLRDGVAGNVAQINVPMLFSGPSVDAGNAATWSILTTGSYGGGIGMRDNAGSGNYFGGMYMASGQMYIGCGAPNEAGIRASVVIKNDYQWYFTGNYINIEGSSPTIRCYDNDQNYTSWIHHNDGNHGFLAHNSFSWACFRNSGNDWQCQNNIIAYASDRRLKKNIVDAPNDIIEHFFENVRIRQFDWDEEKIAHYKVGIKARVGEVGAVAQEMQAVYSDAVAVNEAHNQIKTKDNPNPLKPDFLTIDWTKTVPLLIAEVQNLRRRVAQLENRA

SEQ ID NO: 4 - protein, 1371 aa, unidentified
  REGION 1..1371: note = the amino acid sequence of tail fiber of a bacteriophage
MASIKPLYINAAGLEAQAASGDTVPVDYGGTGLSSLTANSYLRAVSSSAFELRTPAQVLADIGALSTTGTAASATILATARTINGTSFNGSANITTSTWGTARTLTIGSTGKSVNGSANVSWTLAEIGAAPTVHTHVSADITDLQAQLSGRVQRGTLQLNPDGTAPATFFNEVSDTLALKYSNNSTGSTGYPTEFGATLSVIMEKQSTRSFDLHMPTNSANNLYFRGYSSAGTPTDWKTIGALQNTNTWTAKQTFAGGANMANDVLLEYGSGGATIRGSSTGSIILASGAAAGAGIRLRPNGDTSLTGQVAIDTDGIVVATGFSGPLTGNATTATTLATARTINGTSFNGSANITTANWGTARTLTIGGTGKSVNGSANVAWSLAEIGAASADDMLLIGGDNQIGNGNFYTGTATGWSGGSGSIGSGTAVRSIVDSTLASTGKAYRMDIANLPTAGYIEIISNTNVKIARVQGGERAVVAAYARGSAGVRVFLQIRWNDETGAAISYTGTPNNSSYLTSETWTKYTYSATAPTNAVSANLYVRVYGNTAADQWFETSHISMQVGNVSTGYAPSIDELRNDFNNLITTPNVWNQLQTFNGGWTLPNNKMGLLGTGGGSIRGTDTGSVVLSSGTGGSGFIYVRPNGDTSTSFQTVFYATGNVDMPTVRAGASTPNAAGAVLLELVTERSWQFRQRNTGATTQLELFDITGAKDFVLSNTSNTNVIVMNPTNSSISATTFTGALTGNATTATTLATARTINGTSFNGSANITTSLWGTARNITIGSTTKSVNGSANVSWTLAEIGAVDATGFVKKVGDTMSGDLTVSANVSGQMVRAGFSADLAFAQVRTLGDGSSIVWWESILKSSGGPGGESWYRAKSHVWTNDQGNISATLDTSGTFTAYNVLAAKSFSVTDSTATSLIQGNLAINDSLNARGVMYFGGKVANTGNKLRILNPDSSTSLRIDAVTADASAFAQMNFYASQFTFIVGRIGFNGHLNSTATAAVLSAQNGGTVYLRPNGADSDTGATIIGTNGEMNVSGSIRLGGNGRNIRLYDNNADTACVDIGSGIGTGTDRGGYIINRNAGGELSLWARNGGVQLRLGLRDGVAGAVAQLNVPMLFSAPAMDPGNAATWSILTTGSYGGGIGMRDNAGSGNYFGGMYVGSGQMYIGCGAPNEAGIRASVVIKNDYQWYFTGNTINIEGSSPTIRVYDNDQGYTSWIHHNDGNHGFLAHNSFSWACFRNSGNDWQCQNNIIAYASDRRLKKNIVDAPNDIIEHFFENVRIRQFDWDEEKIAHYKVGIKARVGEVGAVAQEMQAVYSDAVAVNEAHNQIKTKDNPNPLKPDFLTIDWTKTVPLLIAEVQNLRRRVAQLENRA

SEQ ID NO: 5 - DNA, 4116 bp, unidentified
  misc_feature 1..4116: note = the nucleotide sequence encoding amino acid sequence of tailfiber of a bacteriophage
  source 1..4116: mol_type = unassigned DNA
atggcctccatcaagcctctttatatcaatgcagcaggactcgaggctcaggcagcttcgggcgacacagtaccggttgattacggcggcaccggtctttcctctctgactgcaaacagctatcttcgtgcggtgtcaagctcagcctttgagctccgcacaccagcccaggttcttgctgacattggtgcgctgtctaccacaggcactgctgcttcggcgactatccttgcgactgcgcgtaccatcaacggaacgagcttcaacggctcagccaacatcacgacctcaacttggggtactgctcgtaccttgacgattggctcgacaggaaagtcggtaaacggttctgccaacgtggcatggagcctgactgaaattggtgcagcaccaactgtccatacgcatgtatctgcagacattactgatctacagacacagctaagtggtcgagttcagcgcggcacgcttcagttgaatccggatggtacagcacctgccacattcttcaacgaagtctccgacactctcgcactcaaatattctaacaactctacaggttccacaggatacccaaccgagtttggtgcgaccctgtctgtgatcatggaaaagcagtcaacacgttcgtttgacctgcatatgccaaccaactcggctaataacctctacttccgaggctattcgtcggcaggtacaccaactgattggaagaccattggtgccctgcagaataccaacacctggactgcaaagcagacgttcgcaggtggagcgaatatggccaacgacgtactccttgagtacggttcgggtggtgcaacaatccgtggctcgtccactgggtcaatcatcctggcttcaggtgccgctgctggtgcaggtattcgccttcgcccaaacggtgacactagcctcactggtcaggttgccattgacactgatggtatcgtagtagcaacaggattcagcggtccgttgactggcaatgctacaacggctaccacacttgctactgctcgcacaatcaacggcacatcctttaacggatcagctaacatcactaccgctaactggggtaccgctcgtactctaaccatcggtggcacaggaaagagtgtcaacggctctgccaacgtggcatggagcctggctgagattggtgctgcatctgctgatgacatgcttttgatcggtggcgacaaccaaatcggtaacggtaacttctacacaggcacagctacaggttggtcgggtggcagtggtagcatcggaagcggaactgctgttcgttctatcgttgatagcactcttgcgagtacgggtaaggcatatcgaatggatattgccaacttacctaccgcaggctacattgaaatcatctctaacaccaacgtcaagattgctcgtgttcagggcggcgaaagagctgtcgtcgcagcatacgctcgcggatcggcaggcgttcgtgtcttcctgcaaatccgttggaatgatgaaacaggtgcagctatctcctacactggtacacctaacaattcatcttacctaacgtctgagacctggacaaagtacacctacagtgctacggctcctactaatgctgtatctgcaaacctttatgtccgagtctacggcaacaccgcagctgatcaatggttcgagacgagccatatctcaatgcaggttggcaatgtaagcacaggatatgctccatccattgatgagctgcgcaacgatttcaacaacctgatcaccactccaaatgtctggaatcaattgcagacattcaacggaggctggaccctaccaaacaacaagatggggttgctaggcactggcggaggttcgatccgaggaactgacacaggtagcgttgtactgtcttcgggaacaggcggcagcggtttcatctacgttcgtcccaacggtgataacagcacctcattccagacagtgttctatgctacaggcaatgtggacatgccaaccgttcgtgcaggtgcatctactcctaatgcagctggagctgtgatgcttgaacttgtgtctgagcgctcatggcagttccgtcagcgcaacacaggtgcgacaactcagctagaattgtttgatttgactggagctaaggactttgtcctgtccaacacatcaaacacgaacgtcattgtgatgaacccgacgaatagctcgatcagtgcaacaacgttcacaggcgcattgactggtaacgcgacaaccgcaacaactcttgcaactgctcgaaccatcaacggtacatcgttcaatggttcggcgaacatcactacatcgctttggggtactgctcgaaacatcacaatcggttcgacaactaagagcgtcaacggttcggctaacgtgtcttggaccctggctgagattggtgcggtagacgcaaccggctttgtcaagaaggtcggcgacactatgagcggtgacctcactgtttctgcaaatgtcagtggtcagatggttcgtgcaggtttctctgccgaccttgcatttgctcaggtcagaacccttggcgacggttcaagtatcgtttggtgggaatccatcctgaagagctcaggcggtccaggaggtgagtcttggtaccgtgcaaagtctcacgtatggacgaacgatcagggtaacatcagtgctactctggacacatcaggcacctttaccgcatacaatgttcttgctgcaaaaagtttctctgtcacagattcaaccgcaacaagcttgatccaaggaaacctggctatcaacgatagcctaaacgccaggggcgtgatgtacttcggtggtaaggttgccaacaccggaaacaagctccgtatcctcaacccagattcttctacctctttacgaattgatgctgtgactgcagatgcgtctgcatttgcgcagatgaacttctatgcatctcagttcacattcatcgttggacgaatcggattcaacggtcaccttaactcgacagccactgcagctgttctttctgctcagaatggcggcacagtatacctgcgaccaaatggtgctgacagcgacactggtgcgacaatcatcggaaccaacggtgaaatgaatgtcagcggtagcatccgacttggaggtaacggtcgtaacattcgtttgtatgataacaacgcagacactgcttgcgttgacattggttcgggtattggtacaggcactgaccgtggcggatatatcatcaaccgaaacgctggaggtgaactatctctttgggctcgtaacggtggtgtccagctgcgcctcggtcttagagacggtgttgcaggtgctgtagcacagctcaacgtccctatgctcttctctgcaccagctatggatcctggaaacgctgcaacctggtcgatcctaactacaggttcctacggtggcggtatcggtatgcgagacaatgcaggtagcggaaactacttcggtggcatgtatgtcggctccggtcagatgtacatcggttgtggtgcaccaaatgaggcaggtattcgtgcttcggttgtgatcaagaacgattaccaatggtacttcacaggtaacactatcaacatcgaaggttcctcgcctactatccgtgtctacgataacgatcaaggctacaccagctggatccaccacaacgacggtaaccatggattcctggcacacaacagcttctcctgggcatgtttccgtaactcagggaatgactggcagtgtcagaacaacatcatcgcctacgcatctgatagacgccttaagaagaacatcgttgatgcaccaaacgatatcatcgagcacttcttcgagaatgtccgcatccgacagttcgattgggatgaagagaagattgctcactataaggtaggcatcaaggcacgagttggtgaggtgggtgctgtggctcaggaaatgcaggcggtctattctgacgctgttgcagtcaatgaggcgcacaaccagatcaagaccaaagacaaccctaatcctttgaagccagacttcttgaccattgactggacaaagactgttccgcttctgattgccgaagtacagaaccttcgccgcagagtagcacaattggagaaccgagcatga

SEQ ID NO: 6 - DNA, 4116 bp, unidentified
  misc_feature 1..4116: note = the nucleotide sequence encoding amino acid sequence of tailfiber of a bacteriophage
  source 1..4116: mol_type = unassigned DNA
atggcctccatcaagcctctttatatcaatgcagcaggactcgaggctcaggcagcttcgggcgacacagtaccggttgattacggcggcaccggtctttcctctctgactgcaaacagctatcttcgtgcggtgtcaagctcagcctttgagctccgcacaccagcccaggttcttgctgacattggtgcgctgtctaccacaggcactgctgcttcggcgactatccttgcgactgcgcgtaccatcaacggaacgagcttcaacggctcagccaacatcacaacttcaacttggggtaccgctcgtaccttgacgattggctcgacaggaaagtcggtaaacggttctgccaacgtggcatggagcctgactgaaattggtgcagcaccaactgtccatacgcatgtatctgcagacattactgatctacagacacagctaagtggtcgagttcagcgcggcacgcttcagttgaatccggatggtacagcacctgccacattcttcaacgaagtctccgacactctcgcactcaaatattctaacaactctacaggttccacaggatacccaaccgagtttggtgcgaccctgtctgtgatcatggaaaagcagtcaacacgttcgtttgacctgcatatgccaaccaactcggctaataacctctacttccgaggctattcgtcggcaggtacaccaactgattggaagaccattggtgccttgcaaaacaccaacacctggactgcaaagcagacgttcgcaggtggagcgaatatgtccaacgacgtactccttgagtacggttcgggtggtgcaacaatccgtggctcgtccactgggtcaatcatcctggcttcaggtgctgctgcgggtgcaggtattcgccttcgcccaaacggtgacactagcctcactggtcaggttgccattgacactgatggtatcgtagtagcaacaggattcagcggtccgttgactggcaatgctacaacggctaccacacttgctactgctcgcacaatcaacggcacatcctttaacggatcagctaacatcactaccgctaactggggtaccgctcgtactctaaccatcggtggcacaggtaagagtgtcaacggctctgccaacgtggcatggagcctggctgagattggtgctgcatctgctgatgacatgcttttgatcggtggcgacaaccaaatcggtaacggtaacttctacacaggcacagctacaggttggtcgggtggcagtggtagcatcggaagcggaactgctgttcgttctatcgttgatagcactcttgcgagtacgggtaaggcatatcgaatggatattgccaacttacctaccgcaggctacattgaaatcatctctaacactaacgtcaagattgctcgtgttcagggcggcgaaagagctgtggttgcagcatacgctcgcggatcggcaggcgttcgtgtcttcctgcaaatccgttggaatgatgaaacaggtgcagctatctcctacactggtacacctaacaattcatcttacctaacgtctgagacctggacaaagtacacctacagtgctacggctcctactaatgctgtatctgcaaacctttatgtccgagtctacggcaacaccgcagctgatcaatggttcgagacgagccatatctcaatgcaggttggcaatgtaagcacaggatatgctccatccattgatgagcttcgcaacgatttcaacaacctgatcaccactccaaatgtctggaatcaattgcagacattcaacggaggctggaccctaccaaacaacaagatggggttgctaggcactggtggaggttcgatccgaggaactgacacaggtagcgttgtactgtcttcgggaacaggcggcagcggtttcatctacgttcgtcccaacggtgataccagcacctcattccagacagtgttctatgccacaggcaatgtggacatgccaaccgttcgtgcaggtgcatctactcctaatgcagctggcgctgtgctgcttgaattggtaacggaaagatcatggcagttccgtcagcgcaacacaggtgcaacaactcagctagaattgtttgatattactggagctaaggactttgtcctgtccaacacatcaaacacgaacgtcattgtgatgaacccgacgaatagctcgatcagtgcagcgacgttcacaggcgcattgactggtaacgcgtcgaccgcaacaactcttgcaactgctcgaaccatcaacggtacatcgttcaatggttcggcgaacatcacaacatctctatggggtactgctcgaaacatcacaattggttcgacaactaagagcgtcaacggttcggctaacgtgtcttggaccctggctgagattggtgcggtagacgcatcaggctttgtcaagaaggtcggcgacactatgagcggtgacctcactgtttctgcaaatgtcagtggtcagatggttcgtgcaggtttctctgccgaccttgcatttgctcaggtcagaacccttggtgacggttcaagtatcgtttggtgggaatccatcctgaagagctcaggcggtccaggaggtgagtcttggtaccgtgcaaagtctcacgtatggacgaacgatcagggtaacatcagtgctactctggacacatcaggtacctttaccgcatacaatgttcttgccgcaaaaagtttctctgtcacagattcaaccgcaacaagcttgatccaaggaaacctggctatcaacgatagcctaaacgccaggggcgtgatgtacttcggtggtaaggttgccaacaccggaaacaagctccgtatcctcaacccagattcttctacctctttacgaattgatgctgtgactgcagatgcgtctgcatttgcgcagatgaacttttatgcatctcagttcacattcatcgttggacgaatcggattcaacggtcaccttaactcgacagccactgcagctgttctttctgctcagaatggcggcacagtatacctgcgaccaaatggtgccgataactcgaaccaagaagtcaccgtaggtaccgacggtacactgaatgtctctggtagtatccgacttggaggcaacggacgtaacattcgtttgtatgataacaacgtagacactgcgtgcgttgacattggctcgggtattggtacaggcactgaccgtggtggatatgtcatcaaccgaaacgcgagtggtgaactatcgctttggggtcgtaatggtgctgtccagcttcgccttggtctaagagacggtgtggcaggaaacgtagcacagatcaatgtcccgatgctgttctctgggccaagtgtagatgccggcaatgcagcaacatggtcaatcctcaccacaggttcctatggtggcggtattggtatgcgcgacaatgcaggctcaggcaactacttcggtggaatgtacatggcctcgggtcagatgtacatcggttgtggtgcaccaaatgaggcaggtattcgcgcttcggttgtgataaagaacgattaccaatggtacttcacaggcaactatatcaacattgaaggttcctcgccaactattcgatgctacgataacgatcagaattataccagctggattcaccacaacgacggtaaccacggattcctggcacacaacagcttctcttgggcatgtttccgtaactcagggaatgactggcagtgccagaacaacatcatcgcctacgcatctgatagacgccttaagaagaacatcgttgatgcaccaaacgatatcatcgagcacttcttcgagaatgtccgcatccgacagttcgattgggatgaagagaagattgctcactataaggtaggcatcaaggcacgagttggtgaggtgggtgctgtggctcaggaaatgcaggcggtctattctgacgctgttgcagtcaatgaggcgcacaaccagatcaagaccaaagacaaccctaatcctttgaagccagacttcttgaccattgactggacaaagactgttccgcttctgattgccgaagtacagaaccttcgccgcagagtagcacaattggagaaccgagcatga

SEQ ID NO: 7 - DNA, 4116 bp, unidentified
  misc_feature 1..4116: note = the nucleotide sequence encoding amino acid sequence of tailfiber of a bacteriophage
  source 1..4116: mol_type = unassigned DNA
atggcctccatcaagcctctttatatcaatgcagcaggactcgaggctcaggcagcttcgggcgacacagtaccggttgattacggcggcaccggtctttcctctctgactgcaaacagctatcttcgtgcggtgtcaagctcagcctttgagctccgcacaccagcccaggttcttgctgacattggtgcgctgtctaccacaggcactgctgcttcggcgactatccttgcgactgcgcgtaccatcaacggaacgagcttcaacggctcagccaacatcacaacttcaacttggggtaccgctcgtaccttgacgattggctcgacaggaaagtcggtaaacggttctgccaacgtgtcttggaccctggctgagattggtgctgcaccaactgtccatacgcatgtatctgcagacattactgacctgcaggcacagctaagtggtcgagttcagcgcggcacgcttcagttgaatccggatggtacagcacctgccacattcttcaacgaagtatctgacactctcgcactcaaatattctaacaactctacaggttccacaggatacccaaccgagtttggtgcgaccctgtctgtgatcatggaaaagcagtcaacacgttcgtttgacctgcatatgccaaccaactcggctaataacctctacttccgaggctattcgtcggcaggtacaccaactgattggaagaccattggtgccttgcaaaacaccaacacctggactgcaaagcagacgttcgcaggtggagcgaatatggccaacgacgtactccttgagtacggttcgggcggtgcaacaatccgtggctcgtccactgggtcaatcatcctggcttcaggtgccgctgcgggtgcaggtattcgccttcgcccaaacggtgacactagcctcactggtcaggttgccattgacactgatggtatcgtagtagcaacaggattcagcggtccgttgactggcaatgctacaacggctaccacacttgctactgctcgcacaatcaacggcacatcctttaacggatcagctaacatcactaccgctaactggggtaccgctcgtactctaaccatcggtggcacaggtaagagtgtcaacggctctgccaacgtggcatggagcctggctgagattggtgctgcatctgctgatgacatgcttttgatcggtggcgacaaccaaatcggtaacggtaacttctacacaggcacagctacaggttggtcgggtggcagtggtagcatcggaagcggaactgctgttcgttctatcgttgatagcactcttgcgagtacgggtaaggcatatcgaatggatattgccaacttacctaccgcaggctacattgaaatcatctctaacaccaacgtcaagattgctcgtgttcagggcggcgaaagagctgtggttgcagcatacgctcgcggatcggcaggcgttcgtgtcttcctgcaaatccgttggaatgatgaaacaggtgcagctatctcctacactggtacacctaacaattcatcttacctaacgtctgagacctggacaaagtacacctacagtgctacggctcctactaatgctgtatctgcaaacctttatgtccgagtctacggcaacaccgcagctgatcaatggttcgagacgagccatatctcaatgcaggttggcaatgtaagcacaggatatgctccatccattgatgagctgcgcaacgatttcaacaacctgatcaccactccaaatgtctggaatcaattgcagacattcaacggaggctggaccctaccaaacaacaagatggggttgctaggcactggtggaggttcgatccgaggaactgacacaggtagcgttgtactgtcttcgggaacaggcggcagcggtttcatctacgttcgtcccaacggtgataccagcacctcattccagacagtgttctatgccacaggcaatgtggacatgccaaccgttcgtgcaggtgcatctactcctaatgccgctggagccgtgctacttgaattggtaacggaaagatcatggcagttccgtcagcgcaacacaggagcgacaactcagctagaattgtttgatattactggagctaaggactttgtcctgtccaacacatcaaacacgaacgtcattgtgatgaacccgacgaatagctcgatcagtgcaacgacgttcacaggcgcattgactggtaacgcgacaaccgcaacaactcttgcaactgctcgaaccatcaacggtacatcgttcaatggttcggcgaacatcactacatcgctttggggtactgctcgaaacatcacaattggttcgacaactaagagcgtcaacggttcggctaacgtgtcttggaccctggctgagattggtgcggtagacgcaaccggctttgtcaagaaggtcggcgacactatgagcggtgacctcactgtttctgcaaatgtcagtggtcagatggttcgtgcaggtttctctgccgaccttgcatttgctcaggtcagaacccttggcgacggttcaagtatcgtttggtgggaatccatcctgaagagctcaggcggtccaggaggtgagtcttggtaccgtgcaaagtctcacgtatggacgaacgatcagggtaacatcagtgctactctggacacatcaggcacctttaccgcatacaatgttcttgctgcaaaaagtttctctgtcacagattcaaccgcaacaagcttgatccaaggaaacctggctatcaacgatagcctaaacgccaggggcgtgatgtacttcggtggtaaggttgccaacaccggaaacaagctccgtatcctcaacccagattcttctacctctttacgaattgatgctgtgactgcagatgcgtctgcatttgcgcagatgaacttctatgcatctcagttcacattcatcgttggacgaatcggattcaacggtcaccttaactcgacagccactgcagctgttctttctgctcagaatggcggcacagtataccttcgccctaacggtgctgacagcgacactggtgcgacaatcatcggaaccaacggtgaaatgaatgtcagcggtagcatccgacttggaggtaacggtcgtaacattcgtttgtatgataacaacgcagacactgcttgcgttgacattggttcgggtattggtacaggcactgaccgtggcggatatatcatcaaccgaaacgctggtggtgaactatctctttgggctcgtaacggtggtgtccagctgcgcctcggtcttagagacggtgtcgcaggtgctgtagcacagctcaacgtccctatgctcttctctgcaccagctatggatcctggaaacgctgcaacctggtcgatcctaactacaggttcctacggtggcggtatcggtatgcgagacaatgcaggtagcggaaactacttcggtggcatgtatgtcggctccggtcagatgtacatcggttgtggtgcaccaaatgaggcaggtattcgtgcttcggttgtgatcaagaacgattaccaatggtacttcacaggtaacactatcaacatcgaaggttcctcgcctactatccgtgtctacgataacgatcaaggctacaccagctggatccaccacaacgacggtaaccatggattcctggcacacaacagcttctcctgggcatgtttccgtaactcagggaatgactggcagtgtcagaacaacatcatcgcctacgcatctgatagacgccttaagaagaacatcgttgatgcaccaaacgatatcatcgagcacttcttcgagaatgtccgcatccgacagttcgattgggatgaagagaagattgctcactataaggtaggcatcaaggcacgagttggtgaggtaggtgcagtggctcaggagatgcaggcagtctattctgatgctgttgcagtcaatgaggcgcacaaccagatcaagaccaaagacaaccctaatcctttgaagccagacttcttgaccattgactggacaaagactgttccgcttctgattgccgaagtacagaaccttcgccgcagagtagcacaattggagaaccgagcatga

SEQ ID NO: 8 - DNA, 201015 bp, unidentified
  misc_feature 1..201015: note = the genomic sequence of a bacteriophage
  source 1..201015: mol_type = unassigned DNA
tcgacgtagtttctgtctcgagattccgctgagatagaaagattgttctttcgtaccacatctgtagactagtggtatgaagatcaagaccctcctcgcagccgcactgatgaccgtcgcactttctgggtgcggcgagatcatagaagaatcagaaatcattcctggcgcagaagctgagatggtagcgatgtgcaatgtgaatggaggctttgttcgcggatgggttacaccgatgaacaaatactcagcaggcaaggtttcgatcctcgaacagtacaggacagcctaccacgttgaatgtgtcaatggtgcgaagattgacaagctgttcgaaggcaagacaatcagataatatcaacccaagactaggagttagtcatggagtcagcaatttacaaggacctcgaccctgaggtggcagcagagtgcggctacttcgaaccgaaggaacccttcaatcaaatcttctcgcagccttgggcgcgagctgcgatcagcgcatacgaccagatcatctactacccgggcagtttcggaacgttccatgatggtcacgtctcagtgatcaagcgtgctctgcgaaagtaccccggcgcctggctcgtgatcgcaccgagcaattcagactacgcttcccagaagtacggcgcatggtcggaactcgcatcgaataagcatcgctacgacaccatcaagaaggtgttggataagcatggcatcactgcctcgatcgacattgatccgatgctcaacaaccgctgtgatcagaacttcactgaccagctggatgccttcctggctgcgggtaagcgcgccggcatctacgacatggccaagcctccggtcatcctgtgtggcaaggatcgtgctgacttccagaacctcaacaactacactgacaaggttatcgtcgagtggtttgaggataccactgggctgagcacttccaagctcgagaacaagaagcggatgaagaagcatctcatcctgcgctgcgtgaacgaggaagagttcaatctgttctgcgagtatttcgaagaccagtacctcaccatccagccgtattacctgcacgatgaaatcgagtctgccaagaaggcagctgtgatgattggggcgacccacaccaactgcaaggaatacgctggcttcttgccttacatcaagatcagccgccacttcaagaaccctctcgagaacggaaccgtgaacaattggttccttccgaatgacgcggttcttcttgactcggacatctttaccggaaccacgcaggcttgggttgagtctatgggcggaaagctccatggactgatcaatctcaaggactggcacggtgcctgggagctcctggatatcagcgacttccgaaagaaagaatgggcgtatccctttacggatatctccagccgctgtagcatgcaggcattcgataccgcctaccacgaccacttcaacgaattcaaggaaaagctcagccatgtccatccgtgaaatcatctcgccgaacgttaaggccatccttgctcttggcatcgaacgcgatacgccttttgagcttgatgctctcctgcacaagaatggtgtcatcgaaatcaacacgtcgctcgaccttctccccgaagtggatcgcgcgttcgagattttcgaccagcttggtgctgtgtatccggtctcggtgaccggcctggaaaacgtggaaagcggcgttggttcgcatcgcttctgcgcgtgggatggcgaattcgcggcgctcctgaccgaggtggtcaagctgatggagactcctgaactgatccagattggtgatcatctctgggagtttgagagcgtctcgaagtatttccgtttcatgcggtacgatcagggcggtgaacatttcccgcactacgacagcgatttcgttgtctacgatcatcttaaaaccttcggacagtcggttcgctacgccacgaagtattcgctggtgatgtacttcaacgactgcgagtcgggagaaatcgctttcatcgacaatgatccgaacccgacaaagggtgattggaatcgtcaggcgactgatgctgagatctccttgcgcatcaagccggcaaagggaaagatcgttctcttcccgcacactctctgccacactgtgctccccttcaccgataaggacagccagcgcttcatcgtgcgcggcgacctgatcttcacccaggcataagacatgactctcgtcccggtaaaccagaacgaactggaaatgtcggttcggatgttcaagcacatgttccgaaggaaggatccgtatcagaagattctcaccctgaagaactacttcttgaactggaacatcaagaaggttgtagtgggcgtctcgggcggcgttgattcggcactagttctcttcctcctggctcatatcccggacgtcgaagtccatgcagtgacgatcgatttcgacacctacagcgatgtctttgaccagggctatatcgagctcttgcagctggctacgacgcgcttccgaaacgtgaagtggcacaagaaagatctgactctggctttcagcgagatgatggtcgccctggacctcgagaaaagttctgatgaagtcttcgccaacaccagctatgcgatgcgttacctgggcttcttcgcctacgctcaagcactcggcggcgtgaccatcggaaccaccaacctggatgagatgggctacgtgggctggttcgggaagaactcggatatgatggtcgacatccagccgatttcgacccttcacaagttcgaagtaatcgagtgggcaaggctgttgggcgtacctgagcgtgtcgctgcccgcgttccgacaggtgacttggtcaacggtaccagtgatgaagaaaacttcggctgcacctatgacgaactttctttctacacgcaccaccgtctcaaagacccggacatggaagtttcgcccttcatggaagcgcatttcgaaggcgtagaaaggttgcgaaagaaaaatctgcacaaataccagggccagaagttcaacccagtcttcctgtaaagaaagatttctcctgtattatttgtagaacataaaccgaactgaggttcagatggaaatcgcgctctggctctgcttgatcccgatcacgtgggcggcaatagcacatttcgcattcaaaaggacgatcacctggaaagaaggtctgctccagggcggcggcatcgcactcgtggttctcctgatctacggctgcatggcatacagcaataccgccgatcacgaaatcctcaacggacaggtgacaggcaagaaacagacctggaccagctgctcgcactcgtattcgtgtaactgctacacgacttgcagtggcacaggttcaagtcgatcctgcacccgacattgcagcacatgctacgagcattccaacgactgggattgggacgtcttcacgacggtaggtaacatcgagatcgatcgtgttgaccgtcgtggtagccgtgaaccacctcgttggactgcggtacagatcggtgaacatgctgcggtcacgcacacctacaccaactatgtcaaggcagctccgagcagcttgttcaacgtcaagctggcggaaaccgaggcaaagtccaaggctgcgattatccctcagtacccacgcatctacgactactatcgcgttgaccacaccattgatatccaggcaggtgtcgcgaacagaaaagcctgggatgcagagctggacgaagtcctgaaaactatgggtgcggcgcgacaagtgaacgtcgtgttggtcttcgtaggcaagcaaggtcgggagtacaaagacacgttggagcgtgcttggctcggcggcaagaagaatgatgtggtaattgtggcaggcgtcacaggcaccaagatcgactgggttgaagccttcacgtttggcaagtcctccggtaacggaatgctcgccgtcaagatgcgcgacgagttgcagaagtacggtaccactgaaaatgcgaaggaaggcgtggctgtaatcacaaaggtgatcgcatccgacttccatcgtaagaacatgaaagactacgaatacctgaaggctgagggtggaccatcggcaaagcaagtttcctggctggttggtattgtcctggtcctcttgatggtgacaactttccttcttcacaagtacgatgtgttcaacgaggagttctacgacaggcacccgaacattcgctacatccgaaatagttttcgtcgttaatccaaaatcacataaacccaacaaaggtattgataatgaacattcgtggcaacaagggctcggcgtggattgcagtgctggtcttcctgggcatcctggcactgggcgcagtcttcgctgtaggcagctatgtcagcgcagccaactacggcaacgaagccgagcagcgcctggaagcgaagtggcaggacaatcagaacgtgctgggccagtacaccatcaagatcggtgaaatggcacaggtgccggaaatcgcgcgtgatgacctgaaggaagttctgaaggcaacgttcgaaggtcgctatggcagcgagggcgtgagccgtggtgctggtgagcagaagaccttccagtggttgcaggaacagaatccgaatctgaacccggaactctacaaccgactccagcagacgatggaagctggtcgtaacgagttcaaggtctcccagacggaactgttggatgagaagcgcgcctatcagacgaacctgggctatgtctggaagggcttctggatgaagctggcaggctacccgaaggtcgatctgtcgaagtacaaggttgtggtcggggctgacacggcacagaagttcgagaccggcgttgacactggcgtcaagctgcggtaataagtagaagtatccgacgaggcgctccggcgccttttcggttgatacgaaaccatacatcgttataatcagcaaaagaaaggagttttcttatgcagcatgatctcgcagttttcatcgggcgtttccagcctttccatctgggtcacctccacgctattgaggaaggcctcaagctcgccaagaaggttctcatcctgatcggtgacaccggtggtcctcgtggcctcaagaatccctggaccgcagaagagcggaagcagatgattctggattcgctaggcacctaccagcacgaactcgtgatgtttgacattgcatacgacatgccgtccaacacggaatgggctggtcagattcagagcattgtcagcaacgcctcgaactggcataagctgcccagcgtaattctgatcggtcacgagaaggacgcgtcgagcttctatctcaagatgttcccgcagtggaagcacatcgacaccggcttcgaagaactggaaagcggacttctccgcaagtacaacgccaccgacattcgcaagatggtctggacgaacacgctgcattacgcaacgggtctcctgcatccgaccacgctgacctacctggtcaatcacatcaagcacaacccagctatctatgaagagtttctcgaggagtacggcgccatacaggcttatcgcaaggcgtgggcaggttcgccgttcccgccgatgttcgtcaccactgactgcgtggttatccagagtggccatattcttctgatcaagcgaggcgaccgacctggaaagggtctttgggcgttgcccggtggcttcctggatcagaccgagtccatccaggatggtgctctgcgtgaactgaaggaagagacgaacattcatctgcaggatgatgtgcttcgccgttgcattgttcgcactttcgtccatgatcgtgcaggcggtgtcagtgaagaagaccgtggcagaatcattacgcatgtgcatgtcgtcaagcttgccgacgggaagccactggccaaggtcaagggcggcgatgacgcagccgaagcacgctgggttccgttgggcgaaatcaactaccgtgagatcttctccgaccatggaaagatcattgaccgcgctctgagtggcgtctgaggaattatcatgaaggacgttatcaacggctttttcgaagaagcagaacgtttgcaggctctggcagaagaacagcgcagcaaggctgctgcaatcctgacaccgctgtttgatctccagcatcggcttgcatggtctgttcactgcgagcctgagttcaaagaactggaaaagtggtatcgcaagccgcgtgataagttcgcaaccaatgcgaaccgtcagcattcttactacactttcgacggaagtttctacgatctctgtgaatggagcgacggtgactcggctgactccattgagctgcatcctatcttcctgacagatgcttctgaggaagagaagaaggaagtaattcgacaggcatatcgtgccgatatcgcagctgtagaaaatcagaagcaacgcgcgaaagaagctgagctggaaaaggctcgcaagcttctcgctgaaaacggtgtgtctttctaaggcacactgttagactataatcacaccaaacgtagaaaggagttttctatgattttcaatccgatccttgcaacagacagctacaagttctcgcacttcatgcagtacccgaagggtaccactctcgtcaagagttatgtcacggcgcgtggcagcaagattcctggcgttaccgcagtggtttgtgctggtctgcaaatcttcattcacgaatatctcagcaagcgcgtgaccaagaatcacgtcgatcaggctgaggcattctgtgccaagcacggcgttcctttcaaccgcgaaggttgggacctgatcgtaaccgatcacaacggctacctgcctgtcgagattcgctcggttgaggaaggtacgcctgtgccgctcaacgagctgatgatttccgtgatcaacaccgacgagcgtctgccatgggtgacctcgtatatcgagacgctcctgctgagctatgtctggtatgcctcgactgtggcaaccaagagccgcgagatcaagaaggtcatcaagcagtacctggacctgacgtcggacaatgctgatgcggaacttccgttcaagctgcacgacttcggttaccgtggtgcaactcctggcgcagctcatgttggtgccttcgcgcacctgatcaacttcatgggcaccgacaccgtcgcaggcatcgaagctgcgatggagtactacggttcggatgtctgtggttacagcatctcggcatcggagcattcgacgatgaccagttggggtcgcgatggtgagttcgatgcctaccgcaacatggttgactcctacgccaagcccggtgcgatcttcgcctgtgtgatcgacagctacgacaccttcgccgcaatcgatatgttctgcgaagaccgttgtgcaggtggctcgctcctggacatcgtaaagaatcgtggtgcgactatcgtgctccgccctgacagtggtgacccggttcagatgccgattgacgtcatcaagtacctgatggaaaaggtcggctacgagatcaacaacaagggttacaaggtcctaccgagtcatgttcgagtgattcagggcgatggcatcgatattgaagacgttgagcacatcctggagaccctggttgaggatgaaaagatcagcgcctcgaacatcgcatttggcatgggtggcggactccttcagaaggtgaaccgtgatacgttcaagtttgctatgaaggcgtgcctggcatacatcaacggcgaaaaggtagacatcatcaaggatccggtcactgaccctggcaagaagtcgaaggcaggcgacctgagcgtctatcacaatccggaaactggagagtggaagaccatcactgaaggttcgctggattcgttcgctttcaacaagccttcgagcgattggtatcgcaaggactatgttgtctatagccactacggtcgcgatactttcttcgactatgtggacatggatactgttcgtaggaatgctgctctttaagggcagcttccttcataattactatggtgagataaatgattctcaagagcgaaatcagaatgtccaaggctgaaattgaaagcctcatccttgatcacctgaaaaataacaacaagcacaatctcaagattggtcgggtcagcttctctgttcgtgagtctgacgaccactatggtggctacactccagctgatcttgaaggtgcaactatttctgtggaactggagcttgacgatggaagagaggatcgaagataagattttggcttatctgcgtggcgaagttgactatgatgcacttcaactgctgcgtgatgcaagaaacgagatcgaaaaactgagagcacgtgctgttgatcttagctgggcagcggacgttgccaatgaccgtgcagatgctttcgatccgaggtacaactaatgtcactgaccaacctgttttcttcagggattgaataccggaagcgcgtcatggtgctggtcaccaagcgcatgctgaatccgaaacggggtggcggagtctctacgtttgtgcgaggcattgctaagtctatgcctgacgacacactcgtagagattcattgcgttggaccagataatcttgatgtctatgagattgatcatccgaatgtcgtgacttatggttatcctcagatggtgaagatcaaggcagaggagccaggcatcttccagcgcatcatgatcaacttcgatcagatcgaagaattccgccacgccttgaacaagtcggtgttcacggaagagaagctctatgatgcgattgtgactacctgccctgagtctgcattggcttgcatttccttcggagcgatgatcgaaccattcaatgtcatctataccacacatcacggcttgatgtctgacagcctgagcaaggttcctttcgatgacgctgtgatctacttcgccaacgaagtgattccgaagtctggatttgtcaccaccgtgactcagactcctctgaatgctgagtggctgcaggaaaagcatggtgtcaaggttgatcacgtgattcctctgctacctgacgagcttcctccttttgctgatatggcaggtaaggaaggcgcactgttcatcggcaagtacgagactggcaaacgacctgagctctttgtcgagatgtgcaagcagactggcatcaagggtaaggtcatgtgcggtggtatcaaagctcccgacgcatggcacaaggctttcaaggaagctggagttaccaactacgagatccgtcagaacctgcaaggcaaggaaaaggaagatttcatcgcatctgcgaagttcactttcgtttcctcacagaacgaatcgtacggttaccttgcactagaaggtctgttcaacggtcctaccatgattgcagacagccgatgggcgaagttctgggaaggctatggtgcaactctgttcaccaaaaagaacatggctgaggtggcaaaccgtctcaatgagatgactctgtgggacaacaccaagctggtaaagatgctggatgatgctgagaacaagtgggttgatgtgatctgtaatcgaaagaattacaacaccaagcctaactcttcgatgctcaaatatgtgacgccggaatggcagactcttgctgacctagcaaaggcgcgcgatgttcgtagcctgtcaagtggagactacaagcctctcttcgaccactgcgagatcgtccatactgataatgaatcaaaggtgagacgtgtctgataaaccaaccaaggaagaaatcgaaggtctcaagagattcatgcttgagaccttcgatttgccctatggcatgatggaatgcaagaaagccttgcatgaatctagagacctcgtagaggccgcaaaaatcttgctgcattatcggatgcttcatatctgatatccagcattccttttgacgaatgaaattatcaattacaatccttgcatgaaaattgtccaattcaaaaacggtaagtttggtgtcaggcgctggaacttcttcaaaggtttcttcggtgagtatgaattcctcacttttagaggtgaatgggaaacacgcgctggctacaacattgaaaatatcgaatacggttctaaagagacggcggaaggatacctgaaagactacgttgattctgaggcgtctttccaagcattcaaaaatgctgcccgtgatatgggcaaaccggtaaagtgaagctacatcgtcacgactaatccagtgacgcaaattatatgatgaacaacaggttgtccaactagccgtcggctaagcgtagtcgcgacgtgagatagagtgggcagggcgagcaatcgtcggaagtgcgtaatgtgagaataaggaaccgagaggttctaaagtatgacctgctctgccacacggcaacaggtgttaggcaagttgattactaactgaattcttgtctatggcgtgaatcccgcaaagggaccaaagtgcaattatagggcgataccgttcacctcgtcctgctgggaagcagattgcaagtttgagtggtgatggtatggacgcagttcccttttctcatcgtcgcacttttggtggtaatagccaaagtgtggctccaataaaccgcaattcttttaaaaacatattttatgaatcaatttcgatatgcaggtataggatctcgtgatactcctgtctccttaaaacaaacgatgatggacatagcttacttcttagcgtatgaagctaatgctattctcgtatccggtggagctcgaggtgcagattcgttctttgaggaaggatgcgatcgtgcaggtggtaacaaagagatctggttgccagaagcaggcttcaatggaagcaagtctaagttgattggtgcatcgaaggatgcctatatcgtagccgagcgatatgttggtcattggaagaactgtaaggcatgggcacgagcagcacacgcacgaaactgtcatcaggttctcggtgccgatctcctcactcccgtttctttcgtagtgtgctggacacccggaggtgagagagttggtggcactgctacagcgatttctattgcagaagataagggcattcctattctcaaccttggatcgaaagactggtttgagacagaaatttctgattggctagaaatccggctaaattgacctttctaggtactgtctgtagactgtatggactaaggtgattaggagttagtcatgggttacggaacacgtccgaacgatttcggtggaaacatcagaactttccagcctgacaatacgaaagatgtgctgtacatcgacacgactttttcgtcggtcacgttgaaggagatcatggagaagatccgtgaacacttcggaagcgatgatatcgagaaattcgatatcgaggctcagtacatccacacggattgcctgggctacgactgttatgaccccggcgactactccagcttcatcgtcatcactcgcacaggaattctgtaatggctgctcgattcagtcgtcacgcgaagcctctctaccgtatcaaccagcacggtgagctctacaaggcgagtgaagaattcaagaccaccatccgtcgagccggagtctggaaccgccctgcatgtttccgttggtgggctgaaggatgccgagagatcaacacctgggtattcgattcccagggtcagcatcgtctcattgtcggatacgatcctgagactgacctgctgtatctcgggcgcaccttgaccgaagaacgccacctccccaaccgtttcaagaatcgagacatctgatgactgctctgctgattggctccaacgcacttcgcgcacacggcatcgctgttgagcgcaggaacctggacatggacttcattgctacgatggattccatcaaggaaatgatcgatcggaacaagacgcgcttcgtcaagattcagcacagcgaagatgcgaaccatctgttcatgttccctcgtaatgggaacgacgccatcttcgatatcgaaatcgcatggctcgattctgtcagtgataccctcattgacatcgtcctgaacaacggcctctacaagatgaccgaggagggctactacgccgtttctccgtcggttgtgctggcactcaagctgtcgcacaagtacaagaaaaactcgcgtcacttcctgaaaacgatgcgtgacattcagatgctcaagggacttggctacaaggttccgaagtgtctgagtgagtggctcaaggatcgcaagaagtggacctacgactataagcatcccaagttggaaggtggtgtgaccaaggctgacttcttcaaggacgatggcattcgctacgtctacgatcacgacagcatccatgaagctgtgcgtcatctgaaaaagcctgcctatcgctacttccagcctgacggtgaggaagtgggcacgtcgaaggaagacttcttcgctcagccgcgtgaggtacagcttctggcagtcctcgaggaaagctatgtgctgagtctcgagcgcgccattgttccgttcaacttgaagactatcgagcagcggaagaaggcttttgacactgctctggaaaaggtctgcacgagcatcacgtctggttggttccggaagtttgcctgggataactttgacgaagtgaatgacctgtataatcaggaatatgtggaccgcttctggcgtgaagtcgaaagtggcaatgtgaagccctacgtgaaggaagaaagcaatggctactaaggaacaagtggacgagattctgacaaagacaaaggaactgcgagaccttatcgtctcggcggaccttgtgggctatgtcaacgtgatggtgaatgaagagttctctttcggacctcctctcatcaatgagtacctggatgtacccgatcgcccgtggcattctagcgactgctacatgggcgatgaaccttcctggaatgcgagtaactgctaatggctaaagatgatttcgatcagcgagttgaagtaatcaagctccttgtcaatgaactggataaggagttgtctgaactcaatgtcaggcacaatgtcgattacaagattgacatgcaagtccaagacaagcatggttcttacatcgtaggcacatcggagtccagcgactggtctgcgagttggtgctgataactgtcctataaaggaatgataatgaagaagattctgttggttgctgttctagctgccgttgttggcctgtcgggttgtaccgatgcagaacgcgcaagctggggctcgctgggtgagcaggcaaaggtcacctgttacagcggtggtcaggtcatcaaggaatacgaatccaccggtaaggtgatgaagctcgatggtgacggcttcgccttcaagaacaaggagacgggcaagttcgttcgcgccttcgccgactgtctggtggaagagaaatgatcagtccttgtgatggcggcggaagtgtcgacccgggtcgcgccaagtttgaggaagctgtcttccggcagtatttcatcaagcatgttggaagtgatctgaggatgaagccaggtatcgtcaacaaggctgagttctgcaagcgggacgaaaatggtaactacgtgcgcgaagaagtaagcgcaatgtggtttggttggaaactttatcagaaggaaaacgtgtaatgaccgtcgagaaagaacgtcatcagaagatcgccgcactcctggacagtgcttccaagcagcttgaagaggcacgccagttggcaggcaacgacacctatcactggtctggtcctacctatggtatgggtggctggatcgagtctggcgaatggcaggcatctagccattcttgctgaggaatgagaaatggaatacgctgattttgaaagccgtaagaagcgcatcgagcagttgattggtgaggctgagggcctgctcgaggaagctcgcgaaatgtccgatggtctctttgatgaaggagcaactcgctcctggcaggcaaagccgtcattcaggtttgaaggccctacgtatggtatgggcgggtcgctgcaggatggcgaatggtttgcatcgagtcagtcgtgctaaaagagtgaaagggtgggacattggcacttcggtgcctttgtccttttaggtaaaccaaaggaatatcatatgcaacgtgacttcatcgaaacctggtctggcgtcaacctatacatgcctgacccagatccggaatccatcctcatcgaagacattgcgcacgctctgtcgaaggtgtgtcgttttgccggtcatgtggatcgcttctactctgtagctgagcactccatccacgtctcctacgctgtacctccggaacattctctgcaagcacttctgcatgatgcgactgaggcttacctgtgtgacattcctactccgttcaagcggatgattcctgcctatgcggaactggaagacaatctgtgggcagtgatcgctgaaaagtttggcgtgccgttcaaactgcacgagactgtcaagctggcggatcgaatgctgctcctgtcggaacgtgatgcactcaaggaacactccaagcgccaatggcctgcggaatacgagaaccatcgtcgttgggaaggcttctatgaaatgaacctgacccaggaacaaactgctcgtgtcttcctcaagcgatttgcagctcttcggtagagtaaatactgggaagtaaaccccaacatggaattgaaatgagtaccgaagaaaaagtgagtgtgctgcctctgccggaagatcctgcttacctccagtggctgcgaaaggaaggctttgaactcgaaagcactgtcccgatggaatcagacagtattgtctgggttcgtaagacaaagtatggcgtgccacgttgtctgatgaatggtgttgtccttgtcgagatcgtgaagaccggcgaccagtttagcatgggcgttcgtgcctcggctaagaattactggggtgcggcttccatctatggcattgatgaagagaaccttgtcaggctgggtcgccagtacgaacagcgagtggtggacgcatggcgggaattgagcgcctaagagaacagattgtcgattaccttatcgcgaataaggaggcaatcttgatgacgcagcagtctcagttctgtggaccttgtggtggcatgaaagtcaccacagtctaccgtaacccagattgtggtcaaatcggagtctggctagatgattacagacgagaaacgggcacttgagccccgagatcgagagtacatcattttcgttctagatggagcatacgctcatggtgaaagtctatctgagcacctgcatctgtttgacgaatttgagatcactcgtgcacaacgaaacgaagttatcttagcatccgactttggtcaagatgaggatcttgtttcagcaatcactttatttgggtgacctatgtcttatacttttacggacggcttgaaagacgtcatcaacggtaatttttcaaacggtggtgagtccaatcgcaggtacgaaatgtgcaaggcttgcccgctgttcaattctgtcgttctcacatgtggttcttgcggatgcttcatgcctgcgaaaaccaaactcgttaacgcaacatgccctgagggcaaatggtaaaatgacctaccgagacacgtatttcttcgacttgtgccgtgaggctgggttcgacgtaaccgatccgcatgattgggtcgaaatgagcattttctctaaggaaatgcttatcgaagaatcggaagaagactgaggcttgttctttcacagtgaatctataaactatgatttgtgggcagtgtgccccgaggtgaaatgaatgttcaagtgtcctgtttgtggtgattactccaattcggctgcttcattggagtcgcacgctgcttggaagcacggtcgacgcattcgagctgaaaactatcgtgcaccatcgtatgatatgacaccgtcaagtactggtgacgcacttgttggtttggctgtaggatatgctttgtcatcgatgtttgattcatcgagtaatgattacagttcgtcatcatcggattggtccggtggtggcggagactctggaggcggtggcgcttctggggactggtaaaaagttgtaaagatatagtggtatgaagccaatcgaaaggttgcttggacgcgggttcgattcccgccaggtccaccaagaacacatttgatcgccttagcgggctttctctagtcagagcggatcgtccttcggtgtctgacaagatgggaagcgtgggcaagagtaagatgacgtgagcaccacggcaagtgtgttgttgatgggcctgcccaggtttcgacaggcaggtaattagaaacgagcagaccactgttgagagtatccactcaactgaataaagatgcaaactagctaaatgtcgctgctaacgacgccgattactccgtagctcgctacgcctaatcgctcagtcctcgcccctactgagttcctcattggggcccctaatttcattcttcgagagattaaatacgaagaaaaggcacacgaacaatgactgataacgaacaaccaaagcagagaatcaatcctcgcatctacggatggttgtccgatatcatgacctgggtcggagtgctgttccttggtgtcatcctcggcagcgcaatcacgcagtcgattgccatcaaggaccgtgatctgttggtttcatcctacacccagacgatcgcaacaaaggatcagttgattgaatctttgtcggtgacaacggtgaaggctgctgacgttgcactcaatcagagtacgactgaggtaaccaaggcacttgatacaatgtctgagcgcgataagacgctgcgcgacattgagaagcgaattgaaacaaagcagcgccaagatgcagcaaagaaggctgctgaggagcgtaaactgcgaggtctcaaatgagaattctcgtcctgttgttagcacttgttctcgctggatgtaagcacgttcctttggatttgacggaaccgtgttatgtgccacaaaagaccaccgagtcggttgatgaagctgtaaggcttgccaatgaccgtcacgatgctcttgtggagtgtaatgcgaaactagaaaagatcagaacgatcttagacccaaaggccagtcaatgagttttgaaacgtacctgaaagaatcagcagcagctgaggaagcacacaaactgggattgtccgcagccggttatggcctttggcgcgacaagaccggtaaggtggtgaagaagaccgtagatgataaacttgtggacgttcgtggatctgaggcgaacctgaagcatcatcacatcaacattcctcagaaccgtgaaggcaaccatgcagagcacgatcagtcttcggacattgtctctgcacatgagacacctggaacattccgtgaaagcgaagtgaccaagtatcacatcaatgaacactctgcggtacatcctgacaaggctggagagctgcacaacgcattggttggcgcaggctataagcattctccttcagcgtttggtcagatgtatcaaaagggtaagacctcggtgatgatctccaaccgtccagagattagcgcaaagcgcggcggaaagaacgatcatcacagtgttctaattcgtaccgatcatgtggcaaagaagaagcctaagaagtaaacctttgaggatttgattatgagcaggctggaagattttgttatgccggtagggaccgaagagattctcttcattgatggcgagcatcgtgtggtaaagatgaccgtcattgatcgccgtgaagcaggtattaatctgttccacaattttcatatccgtatgttgcaggatgcacatttcatctatggtttgaaaaagaaagaggttctaaagtctcgttggggtcacatgacacctgatgaatcttttgaccttgctcagtcacttagcaggatcgcgctggacctcggtctggtagttggcaatggagtgaggatttaattatgtgcgttgtttcgatgattggtgactcgttccaggatcgttggaaggatcgtcttccgaatgattggaccattccggcaatgccgatgccttcgcagcctatggcacctccgttcaaggagcgccgcattgatgtatcgcatccgttccaggcgatcagtcgcgttgagtttgacctcctgaaaaaggaagtcgaaatcatgaaggaccttctggagcgtgctatcaagtacgacaaggacaacaatgagcctcattgcgagacggagagcaagatcgcattcctcaagcaagtggcaaaggctgttggcgttgaccttgaagaagtcttcggtaaataacaatgaagagcttttttgacgaacagggtagcttcaatgaggacgcccggcagttcacaaaagacgcgcaagagatcctaaggccactaatgcagaaatatgccggcgccggatttagctcgcgtgaaatagtttacctcatttcagatgtggcctcgattgaagagatctacatccgtcaggtaaagagaatcagagataagcgtccttagatcagttggtagatcatctgctcgacacgcagaaggccacaggttcaagtcctgtaggacgcaccaagttttgccttagtagagaatggtatatcgggcttccttaaaagtcgccgtcattgtcggttcgagtccgacctaaggtaccaccttcataagcgcccaggggtgcagagagtttcgctagtatctcgctgcaacgacgtttattgaaggaacatgactagcacagaattcgcctcagtagagaattggtagatcggctccgctcaaaacggagtgtcattgtcggttcgagtccgacctgaggcaccaagatgacaaacgaagaaaagatcgctgcaaaggcagcagaagtagtacactacgaaggagtccttgaacgttacggttcgggtcgctggcttgacatgggtcgccgtcacctggctgaattgaatagggaacttcaagagttacgctctcaaagtattgatggtgatacgccgccctcgtaacgcggataagacagttcgactctgtctgagagcaccaaaacctggctatgtgggtgagcggtttagccgacgtcctcataaggcgtttcacactggttcgaatccagtcatagccaccaattgaaacgagccctgttcattcagggcttttccttggctggtcaggtataagtccttgatactctattgttcatagtgggtgtcctgtattataaccactatagcttgtgggtaaataaaaaccccgtcatattgaggaagtcaggtgtaaggcatgggcagaaaagaaatcaacgtaacaaagagaaacggcaagcgtgagccgtatgacgtggcaaagattcaacgccagatcgaatacgcatgtgatgggattgctaatgtatcgcagtccatgattgaactctcgatgaacctcgagttgtttgacgggatcaagacatctgacattgatgagctggctatccgagcagccgtgaacctgatcctcagcgaagagggtcacaccaactaccaatacgttgcaggtcgtctggcatcatacgctctccgcaaggaagtctatggtcagtatgaagtgccttcgctgttctcgattgtgaagaagaacgtagccaagggcctctactcggatgaactgctgacctggtactcggaagatgagtggaacctcattgagacctttgttgaccacaccaaggatgaacgcttgtctcatgctgcaattcagcagttggtagacaagtatctggttcgcaatcgctccacaaaggaatacgttgagacccctcagattcgatacatcgtagctgcggcaacggcaatgcacgctgagcctgcaaagcagcgcatgaagcgaatcaacgaatactacaagcaggcttccaatggcgaattcaccctcccaactcctgtcctcgccggtcttggcacaccaactaagcagttctcaagctgtgtcctacttcgttctgacgacactctcgactctatcttcgctactggcgagatggtggcaaagtattcggcaaagcgagctggcatcggtctggagatcggtcgtctgcgcccagccggtgcacctatccgcggaggcgagattgctcacacaggcttgaccctcttcatcaagaagtggttcagtgatatgcgtagctgctcgcagggtggcatccgcaattcgtctgcaacactcacctacccgatttggcactacgagtttgaggaacttatcgttctgaagaacaaccagggtacggaagagaatcgtgttcgtcactttgactactcggttgtcacctgcaagtatctatggaatcgtttccgtaatcaggagatgatgaccttcttcgatccgaatgaagtgcctgacctgtacgaagcctactaccgtgatcaggctgagtttgttcgtctctatgagaagtatgagaagcaggatggactgcgcaagcgccagctcaatgcagcagatgccttcggtgcattcctcactgaacgctcagacaccggtcgcatcttcgaggtctacatcgacaacgtgattgatcagggtccggttgattcgcagacttggcctatctatcagtcgaacctgtgtcaggaaatcttgctgcctacgcgtccgttccagcgtttggaagatgaagaaggtcgtatcgctctctgcactctgggttcgatcgtgctgggtaagttcaagaagcctcaggatatgcgcggtgcctgtcgtactctggttcgcagcctcgacaacttgctgtcctatcagatcttcctgtcgccacaggctgcgaatgcaaatgaagacttccgtcctctgggcattggcatcactgacctggcacactggcacgctcaacgtggttatacctacggtcagcctgaagcacttgctgagtttgctaagtggatggaacacattcactactactgcatcgaggcttcgattgaactagccgaagagcgtggaccgtgtaaggaatggaagaacacttcgtatgcagaaggcattctgcctatcgacaagcgttcgcctaacctggatgaagttcacaagattgagctgactctggacttcgacgctctacgtgagcgtgttaaagtttcaggcatccgtaatggcctccttcaggcaacggctccagttgaaagctcgtcggttgtggttgattcgtcgaatggtatggctctgcctaaggcactgatctctaccaaggaatccaagggtagctcgctcgtacaggttgtcccggaatacgagaagctcaaggatcgatatgaaccgcttctcatgtggaatcagcgagactgtgttggatacctgatgacggcagctgtgaatcaggcgttcacagatcaggcactgagtacagacaccttctacaatcctgcgttctttgaaggcaacaagattccggcaacattggttgctaagaacatcatgaacttccatcgctggggcggaaagactttgtactacagtctgatgaacaagcgcggatcgaaggatggtctggaggaagtgaaggtagaaacagtcgttgaggaggtcattgcagatggagaagactgcccagcatgtactctctgagatcgattggtctacagtaagcattggatgtcctattccaggtggcgcacgcccctggactcaggaggaaagagataggcttcaagaggcgatgaaacagatcatcgcccgcgaggcagaaatgagagctcgtggagagattgaatgagtcagtttgatatcagtacagaaaccaactaccttgaccgcaagatgttcctggatggtactgttaccatgcagcgcttcgacaaggtgaagtatccgaagatccagcagtatgagaaagtccagcgtggattcttctgggtgcctgaggaaatcgacgtcaccaaggaccgtcaggacatgaaggctgcatctccggcaggtcgacatgccttcaccagcaacttgctgcgacagacgacgcttgacagtgaacaaggacgcgcaccgctgcagattttcggaccggttgtgtctcttcctgaaatggaagccctcctgtctatctggggcttctttgagacaaacctgcactccaacagctacagccatatcatccgcggtgtctatccgaacccaggcgaaatctttgatcaggttcatcagaaccaggagatcattgatatggcagcaagcattggtcgctactacggacgccttgatgacttgaacgttcgtaaggcgcgcggtgagaatgtagacatcatcgagcacaagaaggcgatctggatggctctgcacgcatcctacgcgctggaagcaattcgcttcatggtgagcttcgccacgtccttcgcaatgatggagaacaagctcttcatcggcaacggtacgatcatcggaatgatcctgcaggacgagcttctgcataaggaatggactgcctacatcctgaatcaggtgtgcaaggaagatcctgacttcgcaatgatccgcgatgaaatggcggaagaagtctatgcgatgtatgaagaggtcatccaggaagaaaagaactgggctgtgtatctcttcaaggaaggtccaatcattggcctcaacgtgaagatcctccactactttgtagactggactgctaaggaatgtctcgaggcggttggcatcaagtaccgtggtgaggctcctaagtcgcatccgattccgtggttcttgaagcatgtgaagcaggagacgaagcagactgctctgcaggaactggaatccaccgactatgtgatcggatcactgacgagcactattgactatggcgacctgcccgtactgtaagaaggaagcaacactcgagacgggagaaacgatctacccacaccgacctgacctctacacgctctacttctgggcgtgtttgaaatgtaaggcttgggtaggttgtcatggaacgtctcagataccaatgggaagactggccaatgccgcttcccgtaagctaaagtccaaggcacatagcttcttcgatcccatctggaaaactggctacatgacacgcacacgcgcgtatgcttggcttcaaggaatgacagggctctcagcagatgactgtcacatgggaatgatggatgatgaaatgctgaggaaggtggcaaagatgtgcagacaatttttacttgaaacaggaattagaaacgatgtatgagatctactcgaaggacgcttgtccgaactgtgtcaccgctgcctcactcgcagagtcaaagggcattgaattcaaagtcttgaagttggacaaagactacacccgtgaagacctcttctcgaaggccccttcggctcgggctgttcctcaggtctttaaggatggtgtcctgattggtgatctggcggcgtttcgtcagcaccttgtaagtgtctgattcttggaaaactgacccgaactgactctgttagagtcagaaattgactcgttcttaacatctgcgccgtttggttcagattggactaagaacgggtcaatttcttgtcagagcctcgtgaagagagcctcagaacccttgatacgtctagcaatgaaaaagaaatgaagattcaggttgtgccttaacgctaccttcattaacattcgattgtggtcagcgacagggctcagaaaggccagtcggactgatcgaggggttccaacatggggacaacatgaagacacagaaagacgcgatcaggcgcgagctgttagatcgtgcgacaggtaaaggtagagagccgacgtgggacttggacgtcgagccgaccaaactggaactggtcaaagcactcaacttctactcggcaatttcgacgccggagacactcaagaaatatgctattacgtgggcgagaaagaacgccccggaacgccttggggtcgtagaagcccaacccgatttcaagttccagactttcggtgcgcttatgcgtattgaaagccgcggaatgaagcttccaaaggcagagaagaattcgattgcgaaatttgtgaacgaacttaatatgcctttcaccgaaccgaaacaaattaagccgaggaagaaaaagatgtcgaccgaaaacgtgaactaccgcaacttctgcgacgccctggacaaggccaccgaagcgacggagttcgtcaagcccgatctgaccgttgatccgaaacattcgacggcgtcggtgatcgaaacctgtcagcgcgagctggaagcgatcaaggaagacggcgacatctatccgaagcacatgacgcagtggttcacctacgtcatgaagctgatgaacggcggcaagctgccggaaaaggcgccgaaggaagtcaagaagcgggtcgaaactgtcgtgaacgacaactccgacgacggtgatgacgattcgactccgactcgtcaggcgcgcgccccgcgcactccgaagaaggtcgcgtctgccaagggtcccaagaccccgactctcccgaagaacgatccggtgccggctgctgaccacgttctcaacggaaagaaggtcgctttcctcttcgacactcgctacggtcgcctgacccggatggtctcggattcgaagaacggcttcgagatcaagggcaagaccatccacaacatcgaccactccaagtcgaaggtcgctctgctcaagaacttcggcgacgcgatgcagcccggcaagaacacgaccgacgaactggtcggctggatgggcaagtgcgtcaagaagggcaacccgatctcggtgggcagccgactggcagaagaagtcctggtcctggaagccgcctaaggcacaacggccctagggagaaatctctagggctttttcattggtcggagatcgtaatgagccgttgttcctgcaagaccacgacgcgcgaaatgacctactcggagttcgttgcctgggcacacgagtatgtcactgagagatttcttgtcggtggcctcaaggctatgcgcgacgcgatggaaatcgtcgtccagcagcagtccatgaaccattcattcaacaagggaagcttcccgaaggcggacaaatgagcatccgtagttggtggaagaaaaacgtcaccgaaccccgtcgtcggaagaagttctttagcctgcgagcccggcatggctcgtctactcgttatcacttcctgatggtcaaggaagctctcgaagacctcctgtaccgtttggattccaccggaactgtgtctcaccccgaagccggaatctgtttcaacgcaggcttccagattggtggggattggcgtgatgccggtgagaccttcctcagtctggcagaaatgttcaatgcagaggtccgaggcatcaagaaaaagttcacgttcttcaccgacaatttcccgttcgaagacgtcgacgccctcgatgggttttctctgaacaagtgggttggtgagtccctgaaggtccggcgtgcctgtatcgaatggatcctcgacaacatcgagaagcatcaactgcaccggggttaaatatctcgacacatcaatcgagaacgaaacgtggccaaggtaccctacgacaaggcgaagaaaattctgaccactctgtaccaaacgggaggacaggtttctcgtgatccggtaggtcagaccacgccaccgaagggatcaaccgtaccgaagtccgtcatccaagcggcaacgccagaaaacaatctgagggtgacgaagcagccacgcaggaatgtgatcatcatcacacccttcatggcggaagatccggctttggcagagaagatgaagaggtacgctgctcgagcgactaaggactcgttgaataagaacgaagccccgctcgcatcacacctgttctactactcagtcttgaacgaaaaggatccgattgaacgagacattggcctccaatctcagctgagttggctcaaggttgcagacgtggtagccgtgtatgtagacttctccgtaacacctgcaatgaaagtggcgatcgacaacgctcgcctcctacagaaaaagatcgaattccgaacaattggagcagtggcatgagtcgtgattacaccaacttcccgcatcgcgcaggcgatgtctatcgactgggtgagtcgaacctgtactacatcctgtccattgtcgaaggcgactcggtcaatgacgactggctcaagtatgccctgatcagcctcgacggcaaccgttggtgcgagcctatcgcacttgaccgttctaatgaacgccctgctgacggtctgacggaagaagagttcaccgcccttgtcagcgcagaggaccgagaagctttcgtcaaggcttcgggcaggctggtcttcgcctcgctccactgacagtccaattcggaccaatgctggccaatactagcatgtgaaggtcagcgtgaaatctgacagtctccacagccctatgaccgtcagacttgttcagatttcaccgggtctgacgtaagtgtctgattctattggggttctggttttgaaggggtaccacgtaagtgtctgattctattggggtcgtcacacatgaaggtagcgtttacagctcgtgacgggctgacaacgaaactttaacgagtctcttcacaagacccggagttctgatacagtgtctgacaatgatgtagagaggacgtgatcacctgtagcatgagtcttgtcctattccggactctgttgaggaaatatcatggctctttatgcaatcaagcacatccctaccaatcgcttctacactccaaacacttcgggtgctttccgcaccggacgcaactggagaaagggaaaaggtgtattgtttacggacaaggctgacgcggtgaatgaagtggtaagcctgatcaacaagcatcgtaacggtgaagagcagcttcgcattcgtacctatggcggatacgatgttgcacgcgccgaggatgcagttggtgatggatacattcgtgatcgcgatttcagcgtagttgacgtgaacgtttaagtttcctccgtgtggcgcactggccaaggatggccacctattctattccttgagaacacgatgacaattctttcgatcctcaatcaactggctgcgacttcgagccgcctggccaaagatgcaattctcaaggacaacgcgtccaatgagacgctcaagcgagtgttcaagctcgcatacgacaagaagatcctcttctggactcgtactatcccagatgaagccagctggtctgacgatcctcccttcatcaatcttgacggtgcacttgaccagatcgagaagaacatctgcacacgcaaattcacaggcaatgcagctgctggcttcctggcaagcatgttctcccagctcgatcgcgacgatgcaacggttctcaagcgagtcatcctgggtgacctgcgtgtcggcggaactcgcgaaacggcaaaccgttgctggcctggcctgatcgcaaagccttccttcatgctctgctcggcagactacgacgaagaagagatcggcttcccggcgatcagtcagaccaaggaagatggcgcccgttgtcgtctggaatgggatggcgagaccgcaaccctgaccagccgtgcagacaacgaaattacgcatcatgcgacgttcaacgattgggcgtcaaagcacctacagcccggcgatagcctagacggtgagctggtgtgtttccgtgacggtaagcgtttgagtcgtaaggactccaacggctttgtgaacaaggccatcaagggcaccatcagtcctgaggaagcagaaatgctgaccctggttgcatgggaccttgaagacaagactctgccctacaacgagcgtttcgccaaggtccagtctttcgaaggcaaggtgcaagcgatcgagtctcgtatcgtccattcgtatgaagaagctctggctcacttcaaggaagctcgtcgcgctggtctggaaggcaccatcctgaagaagtatgatgctctgtgggaaggcaagcgtgtcaagttccaggcaaagttcaaggctgagatcgaagcagaattccgtgtcgttggctttgactatggcaagaaggggaccaagaacgagaagcgagttggcgcactcaaggtccagtccgaatgtgggcaggttgcatgtgacgttggcatcttcaaggacttccctgacacgatccgcgatgacatgctgacggatctgccgaccatcatcactgtgcgatacaacgagcgcatcacgtctcgtggtcgcgatacgcagtctctgttcctgccgcgcatgatttcgattcgcctggacaagaacactgctgacaccctggatgacctgatcaagatcgaagcggcaactctggaatgattgagtcttccgtacagacaagagaaggcgatactatcggtttcgcctatgagattcgtcacggtgaggatttcgatcctcgctgtggcgtgtgtacccagtacacggaatacgtgaacaagattctcggcgagtggctgcctgaggcattcatcgttgaggcagattggttgaacacgaatagttcttccggtctcaacatgcgcaagatgttgatcatcaagagtggtcctgagccggttctggaacgacttctgttctggctcactaccaactttgatgagaccatcaaactcgcatcaattgattcgattgtgttccgtgaactaagcacacagaatgagtactcctataccattcagtattgacgctgtaacccatcaaccaatggagtcgtaatgagcattacctttgagcagtttgaaaagcagattgaacccatccacagcgcttattgtgccaagtacaatgagcttgctgttctgcgacgcgagttccagaagctggcaaatcagatcagcctcgacaatgtcgaagatgaagatgagcgcgatgacctgcatgaagaagtaagcgaccgtcttgccgacctgacctacgatttcgatctgcaatgggatggtttcgagcagggtaacatcaacttctgggttccgagtacttgctaatgaccactgaaaccaaaacctcttttgaagcgttccatgaacaagccacggacctctatagccgcctggccttgatcgatcagctgttcaaggaagctgatgctcttgtcaggaacgtcgatcgttcttcattcactgacgagcagctcgatgaagcctatgaattggctcatgaaattggatacgctgccggctggcagtttgacagtttcggtgaaaatggcggctactggcagccttcgacctgctaatcattcaaccaaaggaaatgacaatgagcaatcttgatcttgtgaacgccgccattgaagccggcaagcccctgtacgacgaatactacaagctgcgcaacgttgcagaccagaagctgcaggaaatcctgggtctggtagagtctctcaagctggaccctgaggacaaggatgatgaagaagagatcatcgagatcatcactgacctgggtagccgctttggtcatgcgtgggaaggtcattgggacgtcggcggtcaatgggacgttggtgacgaaatccagtactgggaaccgagcacctgctaatgagcaagaatgaagaattgatgaaggaactctatgagcggacaaaaccgctcaggaaagagtttgacacactcaagttcgctctggataagaagcgttatgagatcgcaggtctcatcaacactctcgaattcgaggagatctctgaggatgatgaagaagcctacgagtctctgattgacaacatcgacagcttcatgagttccttggacttgacttggactggcggacgctatttcgagtggggcgacaaggattggaacccaggcgaagaaattcattactgggaaccgagtaactgctgatgcacgtaatcaaggcacctgttcgtattcgcggtctaccgcagcgaccaactgtctttctggctgggtccattgatatgggctcagctgttgaatggcagactcgccttgagcgcgaactagaatacttcccaggcacgatctacaatcctcgtcgtgatgactgggacagttcgtggcagcagacagatagtgatcctcagttccgaagccaggttgattgggagcttgatttcattgagcactccaaccatgttttcatgttcatctctaaggacagcaaggctccgatttctcttttggagtttggctacatcgttggtggtgaacagaacccggacaagctattcatctgtgtcgaggaaggcttctatcgccgcggtaatattgaagttgtctgtcgtagacaagacatcaagctatacagtaacctcgacgaggcaatcgaggcattcaaaatcaaactggcaagtgatctatgactgaattgttctatccctcgaatctctccaagcctatgcctgtattccttggcggtagcactgcaaagggcaactggcagaagaaggttgtggctgcattcgaagacacgcatattcccttcatcaacaccagtcgccctgattgggacgtcgttgaaccgaaccgtgaacaaaagaacgaacacattgcgtgggaattcaattggcagaagcgagtgctcaatcacttcatctgcatcccagcagatgcgaagtctcctacagtgatgctggaactgggacttgcgatttcgtgtcatggtaacgctgtggtgttcattgatccggagtactcgcatttccacaatgctcgtatcgcttgtgagacctatggtgttcgtgtgttcaccgacttcgatgaagcggtagaaaagttaaaggacttgttcctaacttctcgcctattctgagaaaaacggcataaatactcatatgaaaacaattctcctcacatcgaaaaattggcatcaggttgcagctctagctgtcaagcccgccgacgaacgatatgtggctggatttgatttgaatactgggtacggaatgagttgaaagattgattttcaacttggctttctggacccaggaactgaaaagtttctgggtttttacttagtggtgcgaaaaggttgataagaaaggctgtccatgtagtatatggtttcaggacttttaaacattgacgcgccgaggagcttatgtgaagaacttgtacttgacggtaacaaactttctgttaggctttggcacgttgcagccgttttgggcgacgagttacctactgatgaagttaggaaccgtttcaggaaacatgtaagaaaaggttgtgtagaaaacagtttgatgtaaactacgcaacatgaagtaacaggcgcgcagcaacgaagctgacgcgacgttctttaaaaacaaagattcaagttatacgtcgttagttcaattggcagaacaccagcctccaaagctgggtgttgagggttcgagtccttcacggcgtgccaagttttatgtctgggtagcaaaacggcaaatgcgctggcctgcaaagccatgaggtgcgagttcgattctcgcctcagactccaagttttatatctgtgtgtagctcagtctggttagagtactcgctttggaagcgagtggtcgttggttcgaatccaaccacgcagaccaagttttatcccgttgtatccccagacgctacgaacgtctacaaaggtaactggagtggcgccaaaaagcgctgatgcaggttcgaatcctgtcgacgggtccaaacagttctcggacttaaaccgagtggtggaggatgaactgagaaatcagtgaatcccttgacgagatggagtcattaactcgatcgagaattttgggctgctcgtataatgagtattacacctgccttgcacgcagggaatcggagtttgattctccggcggtccaccaaaacttggggccttagctcagatgggagagcgggtgctttgcaagcatcaggtcatcggttcgatcccgataggctccaccaagtttagatatgccctgttggtggaattggtagacacgcatccttgaggtggatgtgctgaaaggcgtgagggttcgagtcccttgcagggtaccaaacaagactgttcaatcagtcgaacgagttggaaggtcgggttcgaatcccggagtgatgacgtccggattaggtcatcatttggtgtagtgggcagcacgccgatacattaaaaggttgcgcagaagtgtgcttcatttagactgtgaacacagtcaggcaagtcgatcaaaagacgcgccgacaagcccgaagcgagttcttcggctaagaaggaaagacatcgtttcctacttgtaacgacaagtccttagaggatgaagtctccgttagtcggacgcctgagagtggcgaaaaggattcttcggtatttcgggttgcaagcattaaggtgatgcaggaggcttttaaccttcagaacagggatcgttaccctggcgacccaccaagttttaagccccgttggctcaattggcagagcagctgttttgtaatcagcaggttgggagttcgagtctctcacggggcaccaagttttaagcgggtgtggtatagtggttgtgccctagccttccaagctagagagacgagttcgatcctcgttacccgctccaagttttacgatgcatctgtctgctaattggaataggcaacgatcctttcaagttcgggaatgcgggttcgagtcccgtcagatgctccaagttttgctccactcgtctagtggctaggatgacaccctttcaaggtgtagaagagggatcgaaaccctcgtggagtgccaaattatgcgcctatagcacaactggatagtgcatccgaattctagtcggatggttgtgggttcgaatcctactgggcgcgccaagtttcaaatggataggtgggcgagtggtttatgccagcagactgtaaatctgccgcttaattgcatcgttggttcgaatccaaccctatccaccaagtttatgtgtctgctgtcgggttggaggacggcaccgggctgtaaccccggatcctcaaaagggacgtagtaggttcgaatcctaccaggcacaccaagttatatggttccttagctcagcggtagagcaacgcttttacaaggcgaaggtcgtgggttcaaatccctcaggaactaccaaacgttgaaacaggttgtgtagaaaacagcttggtatacaataagcaacatgaagtaaggtccagaccactgaagagtcgccgggacgataaacaaaggcacgaaacgtcgagaggcacaaaacattagcctcgtgagacgtctggtctagcaactcaattgtcgaaaggcaattgtttaggaatacggtacagtgatgtgcctaatggattaaacgcccacaagcggtccgccagagatggttcctctagaacaagtcgacatagtgcagccgaaaggttggcgtctagtatccctaggcgatatgtggaggctcagtgagacacgagattcaggtccaatgccgaatggtgaggatttgatcgtttagcgacggtagtgtttcggcttagcggcaactgactccaaggacattgaatcggtaggtacgtagttcaagccttagcgggtaagggcgagtatcaggtcaggcggactaatgttcgcactgtatcactcggacgtaggcttagcggctgaaacgagaggaggtcgggtaagaagctgtcgcccaaaaggctatggacttacgaacctgctcgaccttagtgggctttcaactttgacggttaatcaaaactacgaaaaacgcaaagtcaggttcggtcgtaagtgaaagtggcttaatcgttgacacgaaagtgaatcaacgcaatttgaggctcgcaaggctgaggattgtctatcaggaagtgcacctaagaggaagcccctctgaatggctcgcaaggtcaagggaaacgggaaggtagagtagcttacgatgacagaggaaacgccacctctttaaactaggcagccatgacggttaacaatgatgcatcgaaagatggttgttgtggaaaagttgggaagggctccgcaagagctgataatccaaacgaatgaatcgtctcgtcagactgtattctcaggtcgacactttgtttcaaggagttgtattcctcaaacgcttcaattgaagtttttgcgaaatgcaatttttggtcccatagtttacgattggttagaactcccgcctctcaagcggaagaatcgggttcgactcccgatgggactgccaagtttgccgaagtagcacagagaaggtgcggtgctcgtggagagcaacggtcggtggttcaagtccatccttcggcgccagatttatacgcgtgtagctcagtggcgacgataagttcaaagacggtaggcatactgtcacgcagagcgagtcgaggattggcgatacgactgtgacgatacgaaggtggagctcgagatcctagctccgacaataacggtacggtcaacattcgagagcgccgggtagataacccggaggtcagtggttcgattccattttcgcgtaccatataagtagagtagtacaaaagttttatccgggtttagctcagtctggtagagcacgccgtttggggcggtgaggtcgtaggttcgaaccctgcaacccggaccaattagagaagtgttatggaaactttagaaacgaaagtgacacgtctaggcaatgggctttatggatgcaggatcatcaggtcagctgacaagaagccaattgttgaattaagagttgaaaagtctcagattaggaacgctatgtttgacatgctccgaactctagacaagctgggatatgatagtcctatggcacacgcttcgcgacatcgcggtaaggcttgtgtcacagactcgaaatatatctggcattgatttattctggacgcgcctaatggggaggcaccgggctgttaacccggcgatagaaatatccgacacggttcgattccgtggtccagagccaaatatggattacaggccaactggtgtaggcatgcagctgttaactgcagattgttgagttcgattctcaagtagtcctccaaaacaaacggtctattagtctatgggttaagatactggcctgtcacgccggtgtaacgagttcgagcctcgtatagaccgccatagttaaaacgagcatgggtctgctgggtgaagattttgcgttgtcagcgcaaagatgatgggttcgaatcccatatgctcgaccaaattaagaatgatgcgcggtcgtataacggcagtatactgggctcataacccggagatggaggttcgattcctccctgcgctaccaatcaacgggtccgaagctcaaatggcagagcaactggttcttacccagtaggaagtcggttcgatcccgaccggacccaccaaacaatggactcgttcccgtagttggtcgaacggagcggactcttaatccgacggcgaaagcccatcgcaggttcgaatcctgccgggtccaccaaaatgagatagatatgccgaagtacaatttcaagtgtagcgaatgtgagcaccgcggtgatgtctggaccggcgatactgaaaaggtcgacgtggactacaaagacgtagagtgccctggttgtggaaaaaagacctacaactatgctccttgggattcaggtgcttcatctcagtcatggggtcatgtgaagcctacaacactaggcagacagaaggctcctcaggattttagaaacttcctgacacagattaagaaggcacatccaggttcaacaatccgagatcattaatcgaaaaggtgttgtgatgtacgtgtatcaaacatattatgtgtacaccgagagattttgtcacccagacccacttgagtgggaagaaattcgtaaagtgatttgtactacgttggatgagagcttggcgcaagaagttgctgacgctcacaacaaggaacacaacaagatttcaggttacaaagactacgccaccgttgcatgttatgcgttggcaagtcgataaagaatcgccgttcagtagctcagttggtagagcgcccgccacgtagcgcgggaggtcgtgggttcgagacccacttgggcattaaggcgctagggcgaatttaaagtactcacatactagttcgagacagtatcgcccggatcctataattgtcagcaggtaatggtcatgcagaagaaaattgacgtgaaagcagtcgaggcgttcatgcagacgcagagccctgagacaaaagtttatcttggagcagactccgagaaggtaaaaatcaatggtaagatgtacgcggattacaccgtcgtcatcgttgttcacattgatggttgcaagggttgtaaggtattcgccgagacaactcgtgaggaagactacgataaggatccttcaaagccgttcactcggatgatgaaggaagctgaaaaggtagccgagcttcacgatcgtttcaaggacaccttctacgacttcgaggttagtattcacctcgacatcaacccgaagaagacggcaggttcaagtatcgcaatggaagcggcacgtggttacgtcaaggcgatgaccatggttgatcctcacttgaagcctgtggcatttgctggttcttatgctgcggatcgcgctaaagaacttggtatgtgctgaagatatgcccctgtaggcgaattggtatagctactggccttagaagccagcgccgaaaggcattgacggttcgagtccgtccaggggtaccaaatatgtgtcggagtagctcagttggtagagcggtagcttgaaaagttacgcgtcgcaggttcgattcctgtctccgataccaaaaacaccgtcactcaggtccctcggtgcaaaataagggaatactcaggagaggagattgtagtatgaagttaccttcgcgttttcaaatcggtgataaggttctcgctggtcgtcttgatggcgggagcaaaggtgaagtaattggtgtacacttcaaccgatacaaagtatcgtatgatgtggtcgacgagttgacccaacgtacaaagaagcacctcagtgaacgggttcatcctgtcacagagtaaatacagatataagacaatttgcatcgttagctgagatggattagcgcttgcctgaagagctcgagaggttggttcgataccaacacgatgcaccaaacaaaggaacgtgaatgagctttaagccggttaatactttcgtcatcgtaaagcgtagggaagaagatacaacgagtcagggaggcatcatcatctctggatcagttgatcataacctcttcactgttgtggccaagaatgatcttgtgacattcgttgagcccggtgatacggtagtaatcaacattcgcgaagcagctgaaatcgacgatgtgcattacgcagttgatgcaaagcacatcttcaccaaggttgctaagtaagacagttttgcccaggtgacggaattggtatacgtactgtcctcagaaggcaggttttgagggttcgagtccctctctgggtaccaaagtttcagtgttccacgtgtcggaattggtagacgagccagactgtgaatctggagtttgcgggttcgagccccgtcgtggtccccaaagttgatcaggtgattcgccaccttagagtgcgaaattgaaatattgcctgttagctcagtggtagagcaatcgcccgataagcgataggtcgtcagttcgatcctgacacgggcaaccaataagccttcatagctcaaaggtagagcactcgcccgataagcgatagacctaggatcgttacctagtgaaggcaccaaaccgttgacgaaacagcgtaagggcgctaaagtagtacgcaacaaggtattctagttggagccttgcaaagagccggactgttaaaggttgcggcgagactagattggtagcttaattagcttacggtgcatcatatgttgctagggtatgatgactcagaagccttcgggaacccttaacttagctacaaattctatagcccagtcgtttagttggtccaagacgccgtcctttgaagtcggtcatcgtaggttcgaatcctacctgggttgccaagtttgatgcctcttagttcaatggtagaatgtcgctctctgaaagcgaagacaacggatcgataccgttagaggctgccaaatatgggactgtgccggatagctcccggacattatgatgttagtatgcagaatcaaagcactgtggacaggtaccgggacctttgtgatgattcttcagaacgttgattgatgcaggtcccgccagatgcaaaagtaagactagccgttcaagtcggtaagcacatggtgtgcaccatgccgcgttaggtgtggaggaggcgttcgaatcgtcggtggttgccaggcccctatagacactgcttgcaagagggatttaaagtaaccaaatgaggtcgctcctcgcggaacagttccctcggtactattctatgaaggttgtagctcaaaggtagagcgccgggtgtcggacccgggtcaaagagtatgaagttcgcgcgaactgtctgctcaggtgcaggagtcgaagcctgtcagccttcccactaattgataatgagagacgatgagacagttcaaccttcgtggtaagaagacatatcgtcctggctgtggttgttgcgttgttgaaaacttcaagccagaaatcattgacaagattcacgcatacgaaatgcgtaatccagatgaattcgctctcacagcagacgatttcgattgtgtagaagattttctcatttatattgatgttcccgttgaccaagtttgttatgatagttcacactgcgctcccttcaaaggcaaggaagaaagccaagaagaaggttgtaccgacaaggacgccagttaagaagttcgttgaaaagaaacgacagttcattcccaagatccccgtttaccgtgcagcaggaaccgagcacatccgatcacatggattggagaaggtgccgcctaaactggaacgtccaatcgtgtatcatggcgatatggctgaacgtgaagcggctgctcaagatcaaattgagtaccgtgagcatttggttagaaacgctttccgtaacgggaaggtatcggcatgctacatttcaggatgacctatgaatactgtgattgaaaagactgacaagggtgtgatcaaaggcgcggtgttcatcgtcgccggcgataggcattgggttgagggtaatgtctacggcaaccccaacttcaaggatggcacctatatccacacgtccaagattgttgcagttcgtggacgccgcattgaaaccctgaactcgttctacacttgcgagttccacgttgatggacctgttcgcctatggtaacccaagttcgtattctgattgatgagtgtggtgcacctctggattccattgttgaagtgactgaaatcttggatgatggtcacatcatgtatacctgggaagacatcaccttcatggcttcaccggaagcctgggcattgcattatccggattctgcatatggatatgattctcagagcgctggcacagacatcaactacgagattttgagaaacgccgctgagcaattcctggtgtttgttgaggaagaaaaactcgacgaagccgccattgattacttctacgacgtgttcaaggaaactctcggtaagtagaaatattggagcgtaactcagccaggtggctgacgctgtttgctaaacagttgggaccttatgaacaggtctggggatcgagacctctgcgctccgccaatttggatttgatcatgaaaatcgtgctgcttgatcttgaagaaactgtgatcgataactgggacaacatgaaccttctcctgggaaacctggaaaagattcgatggtcgattagccaaaccgattgtaagctggggttgatgtcctgggctgtatggcatgacgaggacaaggctaccttcaagaagcgtttgcaaggtccactcgaagaagtgcttggtaagacgttcgatgatgagttgatattctccatgcgcgacttctcagacatcatccttgcgcgccgcaagaaatggcttagccgtgacgatatgtttgagctattcggcaaggaagaatgtctactccaactgctgaggcttgaacacttcggaaagaatgcccgtgttactctgatcgatgatgtggttgaccataatatggagttcacaagaggcaatgccaaggtgcgtttcatcaacgtgaccaatcctcagtacaagcattggaatatcaatgacactgtccatgactatggcagttggagagaatgatggaagaacttgctcctcagaaaggcaatatgcctgacagcttcatcctcgttcgtacatctgcaggcgttcatgtgcttggtggttggagcggtggctatctctacggcgatagctggcgtctcagcactgcattgaagcgcgtagttgagtacgatggtgattgggtagttgttgaaacaagatcaggttcgacctatgccctaccgacacaagcatccattcgccgttatactttgactgtgacgacttcgggcgtgtttaactcgttcgaccgtcaggcaaaggaacaaggaatcctctttgaagcgattccggaatccgaattcaacgatgtaatcaaccaactggaaaattgatcatgagcaatgctaagctgcaacgtctggaagaagagctgtatgaaaagctgcgcgagattcaggatgtcgctgtagagacgaacaccccgttctctttctccatcaactaccatacctatgatgtgttcctaccggatcatgaagatgaagacatggtagaatatctgaaggaagaagttggtgttgaagttggtgattgggtcagctctagcgatcgttgctaatgagcattgacactgacctctatgagttggtggaaggtagaccagacgcagcttccatgctcgtctgggctgcatcactgctcgggctaaacgccgttcctgagtccgaagaagttgaagctgcaattggtatctttgaggatgctcgagagaatatcatcgagaagcgtgctaaggatcgtctgaccgatatcgttcgctacattgtcccttcccagtatgatactaaatgggacaggcgaacgtcgaagcatcctgacattcctcgtaattggtggaatggtgctttcgtcaaaacgttcggatggaccaaagacagcttcattgtcgaagttagctcctacgtcggcaacaacgagtatgatgggacaacgattgagattccccaacatctcgctgacgtaaagaacttcaattggaacctgcaagataagattcctcttattgacgcattcctaaaagcagccaaccgctaaatatcacgtaaggattgttaaccaaccggggagttggcaccgcttcgaaagcggtaggtgcccgaaagggcatggggatcgagacctcagcaatccgccaaacaatggacagtaaactagccggggagctagcgccgacttgaaatcggtaggcacgtaatggtgtggggatcgagacctctgctgtccgccaaattaaaggatgatcatgagtcgtttgaagtatgatgaagtgccgtatcagaaaatcaatccaggtgatcgttgtatcgtaatgaccacttgtactgggcgctcttcaatgtggtcagcaacctacttgggtcagcgaaaaggtcggtgcgttgtagatattgatgattaccaccgtcgccttgttgatcaaaacgatgtagagtatgattggcgcgccgagagtcgagagatcaagtacccaccctacaaccgagccacatacgccgaagatcaagctgcataccgagctaagatcgaagagcgccgtaagggttacgactacaagaagttctactatgtgcgtcgctcgactctgcagaacaacaatgtctatcctgcggatatggcactgaaagatttcaagctgtaaatagaacatatggacagtaatctggcttggtagtcagcaccgcttggaaagcggttggtaccgaaaggtatgggattcgatttctctgctgtccgccaaataaggcgaacgatgatttacgttgtatttgatgatacgtatcgcggtgcacacaaaccatttcattcaattgaggcaactcaagaggatgcagatagggtggtgcatgatttgagagaaacaagcacatcaacatgtgcaagaacactgatcaaatggaaggcatttgagtttggtcagacgtttgaactacctaagcccttatagcacagtggcagtgcacctcattggtaatgaggaggtcgtcggttcgatcccgactaagggcaccaaataaaggaaatggatatgactgatacgacaagcttcaccgctgttggcgaaggttaaaaatctgcgggtataattcagtctggtagaatgcttgcttgccatgcaagtcgtcgcgagttcgaatctcgctgcccgctccaagatgtcaaaagccagggctttaatcggtcctggctttttctttggttgaatagaaacagtctacctataggataaagcaatgaacagacacgacgtgaaagaccagctcgaagacctgtggttcgatgtgcgccattggttcaagaatctccgcctggaaatcgacacccgaatcaacccacgccagaagtggttgacgaaagaaatcggtcgccgtttcgtcgacaaagactacatcatcgagacgaccatcttcgaaagcatgatccacttctgggaagaggacgatggagaaaggtcgacccgctaccagttcgagcactacgaaggaccgtgtggtggcaaggcgctcaagcccgaagaccaagaagcctacgtataccgacgtaagctgtacgctgacctggacaagtgctaccgttgggctaagacgcgtaagggcttctgggcagactgctacaccaactacaagccggaaaacgagaaaaaactcgaagccgaagacacgtactatatgaacgaaatcatccgtctccgtaagcacatgtggacctaaatgtacggaatccctgagaactaccggcgggtggcagaatctttctatcgcccgcatggttgcaccttagatttttctcaaaaggcattgctgcaagctttcgagaaagaaacctacggcgttgaccacgacatgtcgaagaacggctgggcttttggcaagaaagccttcgacatcacaatcgcaagttggcgcgaagatcttgcagatggtcttttctgcaagtatgactacctccgagactatgaagaagattcgttcgagtatgagttcatctggaacgtgatcaagaatttttcttcggcaaggctgttcacttactgatcttgttctatccaggcatcctgcatatcataattgtgtagcacttatacacctttgaggaaatgataatgagcaacgaagtttgcgtgaagttcccggcgcacctggtgcagaccgtccacgacggctacctgtacgatcgtaattcgcgccagctgttctcgttcaagtctggcaagttgaagccgatcaagcaggtcggttgctaccaggcaaagaagtcgtacggtgaagatggctgggctgtctccgtcagcggtaagaagaagttcatggccaagaaggagctccagtcgctgtatcctacggagtatcaggttccgtttgcatgagcttcgttatcctctactgggcaggtgtcatcgtcaccggtggtgcctgcattttcggactctaccagatttggaagacgaagacctacacgccaatcggtttcgagcatgatgcaccagcgacgctgggttctttccttctccggatcttcctggcaatgctcgccacctttgtaccaatcatcaatgcctcactcgccatcatgattgtattcttggcagcctacatcgcgatcgcggaaaagtttggtgacaggattctcaaagtccttcggagacctctgtgatagcagctttcatcatcttcatgcttttctatggcggtcctgccttgattgttggaattcccggattcctcaatgttcgggcgatgatcaaggacaaggtgttccgagactggatcgaccattacgaaaaacggacaactcgtggtgatgttctggggagagcctcccttcttgttcttttgactttcttgccagttttcaacattggctttgcacttttcgttgtaataggatggcttcacgctgcctggtacaaattcttcggtgaatggtcaaggacacctgtataatggaagcgattatctttctgattgtctacctcatctcgattccgtttcctgcctatatggcttggaaagaagttgatgaggtccgcacatcaaagcgaatcaaaggcatccataacttcttctatcgcgatgccacgcggtgggatttgatctggacaggcatatggtgtggctttgttgcgatgctgccactggtcaacactgcgctcaccattggtggagctttggtttggatctttgagaagctttgggcaaccaaattcattgcatggatgaaaactccgctatgagcatgaacacaattccaacggaactgatcgcggttccgaattacgatggctacttctggcatccgggcgaagagcagttgtactcgctcaaggtgaccggaacgcttaagccgatgaagtatcatggtgcgagatatgtgccaaagctgtatcggcaaattcctgcatcgtattccgtatcgcgtgctggcaagaaatcaattctgaccaaggaaacgctgcggaaaatcacacaacagaaatacgaggtgccttatgaaagtcggagtcgcatctgatctccatctagattttgcggatatgaaccccgagttcttccagtggcgtggcgacctgctgcttctcgctggtgacctcggtgaggaagattatctgcggaagcatggtgctgagttcttcgatggcgtctccaagatggcggagcaggtcttcgtcatctcaggcaaccacgagttttacggctctgagctggatgtagcggaagaccacctggacgtctatctggagcagtggaagaacatcatcccgctccgaaatgaggtgaagtcgtttggtcaccttgacgtctttggtggcactctgtggactgattatcacggtagtcctatcgcggaaatggctgccttcatgggtttgaatgacttcaagcaaattcgcatcaagaaggcaggttaccgaaagatcacgccgcgcgatatcctgatcgagcatatgaagggaaagaacaagctgctggacttccttgagaagcctagtggtggaatcaagttggtgatgacccatcatgcgccttcgatgcagtctgtgccgaaccgttttcgtgctgattacgatttgaacaaagcgtattgcaatcactttgatgcgctgatcgagtctttccctgatctcagttattgggttcacggacatacgcacgattacatcaactatactatcggtcagacggaggtgatctgtaatccgcgcggctacccagctgagcgaccagcacatcttccgccatatcaaccaagggatattttgctatgaacatttttatggggtcctggtctgaccgtgaggatatgatcgcggatttctgccactatgatggcgaaggtcgcgagcgcatcgaaaactatctcgatgacgctcagatcatccttgcatgttacgagagctctgggtacgaaggctccgctttcgtgctgttccgaaagtggggaaagtattacgaagtgaacggtagccactgttcctgctatggcctcgaaggacagttcgaacctgaggaaaccaccatcgaagccatcgcgcatcgtctggagcatgggaacttggggcgtgagtattcttacaccacgagtagctatactcagaatgttttcgcggatgaactggaagaagcaatcatgaggctggagaagatctaatgagcatcgttgaacaactcgctcacctctgcgtgtgggcaggcacggataactaccgttggaagatgaagcaggtcggctggaccggttggtccgtcgacagtctcaaggaaaagcctgccgccgaggaaggctacgagaaggagtaattatgggcggcaacgcttttgataaggcagaacgcctaacaccgcagttctacaaagatgtcgtagacgatatcaagtggctccttcggaacatcatggggtatggctccggcttctctattcctcattctgtgaggaacaaggaaagctacggagacgtcgatgttctggtggcaagctcacagatgcaagctgcactcaaacagatgaagaacggcttcaatgtcgttggtgaaatctcaaatggttgcggctacaatctcctcgttcacactgatggacagtacgttcaggtcgatttgaacaaaaccaaggatgaggacatggaatttgcgttccattacttctcttggaatgacctgggtaacctgattggacgtatcgcacatcgtcaaggtctgaaacatggtcacgacggtctgtggtatgtgcatcgtgatggtgaccatcagctgggtgagatcctgctgaccaaggactacgacactgcgctgtgtcatcttggctttgacgtcaacgatttccgtgcaggctttgattccttcgaacagatgtttgattgggtcgaacgttgcaaatatttcgagccgagcgcattccctcttgagcatcgtaaccatcaggctcgcgttcgtgatgcaaagaggaaggtgtacaacctgttccttgagcgactcgccttcgatggagactacgttccttcggacaaggaaaagcacctcgagcgccataaagacaaatggcctcacctgcgaaatgagatcctgttcctgaattgtcagaacgctgttcgcaaggaagtcaaggctaagctcaacggtaatatcgttcgagagttgactgggcttgatggaaaggagttaggtgagctgatgcagattgtgaagcggatgctacctgaggacaaggtatacagcatgttcccagctgagattgaggaagggatcatggaggcttttgaacgttacaaggtagagaagaatgcgactaattcttgattggactaatggtgagtatgatgacactcgcacctgggttgaaccggtagagtttgaatccaaggaagtcttctttgaaaagctcgaggctaagaagatcgagtacaaggaaaatcgtgacaagcagatctctgtccgtgagaaatatgtgcggaaagaaatcagctatgacgaatacttcgagcaactggacaagcttgactctgtgaatatcgtcgatgacaaggggcgcgagttcttccttggcgatatgatttacatgggtcgctgggatccaatcactgtctacaccgttgatgaatggtacggagattgatatgaaagagaagtcgaaagataagctgaaatactacgctgtgtctgcaaagacggaatcgggtgatgactatctgttcctgctcaaggcaaagaatgctctggatgtagccaaccagttctcgatggctatggatgaagagctcggctacgtctactacaacgctgttgaagccgaagatcctgaggacgctaaggctgccaagaaggccatcaatcgtgcaatcgaaaatgcagagattgactgaggcactcaaagaatttgcctatgatatgctctatggtgttggctgcatcatagagcttctcatcgactgtgcaattggtatctgggaagactgcgtacgcaaagggtaaatactgtggatacatcacacaggacattttccaatgccactaagtttcttccccgatgccgttcctaccgcgatcggctgggcacatccactgaccggcgaacagctgacggcaggtgctattccagcatctcagcttgatggcgataccccggttgatttctacaagccaaatgctaaggccaagtctttccttgacccggctggttctactcgtaacctgatcaaccatgttgctcacggcaagcgagttgagtttgcagttcactccctcgacaagattgcctcagtggcatggacgttcgggggtgcagctgttgctagcgtgaatgttaccgcaggtggttctggctataccagcgcgcctaccgtaacctttgcagcaccgcctgcaggaggtgtgcgtgctaccggtactgcggttctaactggagcagccgtcactggtgttacgatcacgaacccaggttctggctacactgctgcaccagcaattacgttcgccggtggtgaaggcacaggtgctgcggctactgctgttcttgctgccaacgcagctgttacaggtggagctgtccagcagaaggtcttccctgcaggtactcacagtgtcaaggctgttgtttcgtatgtcggtggcactccagccaacgttacgttgaacacttcggtcaccgtagcctaatagaaagaacccgtagcggcgaaagcttctacgggtttttctttggtgttgtttcgtcattgatgttatatcatatagtcatgaacacattctttatttctgatacgcacttcacccacggaaatctgatgaagcattaccctaatgggcgtaatcgtttcgcggacgtggatgaactcgatgaacacatgatcaccgagtggaatgctcgaattggtcgaaaggaccgcgtgtatcacgttggtgacttcggcggatgggacattgaaaagtccaccaaggttcttcgtcgcctcaatggccagaagttcttggttccaggcaaccacgacaagaagcacatcaaggacgagaagttccgttctcagtggtcgatgatctatccctattcgtatgctgagatcagctgcgaaggtcagccgattgtgctgtgtcacttcccaatctgggaatggatgcagattcatcgaggctggtggcatattcatggacacgtccacggcaagccgactggtattcctggcaagattctcgacgttggagtcgatggccacaacctgttaccatggtcgtgggaagaagtagttgaacacatggcaaaccgcccaacaaggacacatcatgagcactgaaatcgaactgctgtttgaaaagcttgaccagatgggcatgcgcctgggtggtctcactctgggtgacaatcctgaaaatgctgagaaggtagctcgcgaactgcgactgagcctggaacgtcttgaggatgttggtctcgaagaaattaccgacttcgactgcaccggcgaaccgactcaggaaaagattgatcgtgatcgccgtgctcttgctcgtatgcagaagcgagctgacgacatcaaggccaagacccgcgatctcaaacgtgagctgggcgaggacctgatgaaatatgctgaagaaaatcttcgcccctattcctatggcaaggcaggcattgaagatgccgtagacaaaatcgtcaacactgccaacctcaatgattacgattatgaggacggctatagtggtttctggcttccttccaacttcggctgctaaaggagaatcaaatgccttactcgattcctatgtatgaaagtgaacgcggctggggttccaagattgatggctatgctggtccgtttccgacctacgaggaggccaaggatttcaagaaggcctacaatcgtaagtacaataacgaagcccgtgctcctgactactacatcatggcaatggatccggtagaaaccacaccgactatgaagcatgactaccgatcaactgtctgagcatgtcgtactagacaaagcttggttcaatcggttagttgagttcatcggtcctggcgccctcacctacatggcaagaaacatgcctgagggcgtcgttaccgtcccattggatattgatctatcgaaagttagatcatagtctaagcaactgtggacaccgactttctgattcctgtataatgctttggtagcacgattcattaaaagaaacttcaaatagaaagaaaaagtagaaggcatgaaaacaatcgaaaagcagtttagaaaactgtcagaggtggaacacgttctgcttcgtcctggtcggtacatcgggagcattacgtcccacacttctgtggaacattgtccgacttcgggaaagatggagcagcgtgagctgactttcaatcctggcttcctcaagctgttcgatgaagttgtctctaactctgtcgatcattcgaagcgcccggaaggcaagaatctcgataccatcaaggttgatatcgatcactccaccggtgagatctctatctacgacaatggtggtattcctgtcatcaagcacaaggaatacaatcagtacgttcctgagatgatcttcgagcttcgttcgggtagcaacttcaatgatgctgacgagtcgatgctcactggtcagaatggtgaaggtgcagcactgacgaatatcttctccaagaagttcactgttgagacttgtgacggcaagtacaagttcaagatggagttctcggacaactctcagactcgatcgacacctgtggttcgaccaggttcgggtggcttcacaaagatcacctatcagcctgactttgaaaagctgggcatgaagggcattgatgaagggaacattgcagttctcgtcaatcgtgtctatgaaattgcagctacgaattctcacctcaaggtgtatctcaatggtagtcgcatcacgttgaagtccttcaaggattacatcgagatgttcacacctgagtatgcctatgacgaaaacgaacactggaagatcggtattgccagtgctgaggatgggttcgctcatatctcgttcgtcaatggcactcgcacaaagactggtggtagccatatcgactatgtggccaatcagatttgtacggaacttcgtgctcacatcaagaagaagcacaagatcgacgtcaagccttcggagttgaagcagcacttccgactgttcattgatgctcagatcgtcaatcctcgctattcgtctcagacgaaggaagacctgatcactgaggtgaaggacttcaagacgagctggaccattgatcagaagttcgtcaacaagatcatcaagtcgacgatcattcagtcggtgcttgactgggcagctgcaaaggctcatcaagaagagatgcgcgagctccgtaagctcaacaaggcaacggacaaggctaacctcaagcacattgcgaagttcaacgatgcgactgaaaagaagaatcgtcatttgacttcgctgttcctggctgagggtgattcggcagccggtcctctgcgcggtgctcgtaatccgaagctgcatggcatctttgctctgcgtggtcgaccaatcaatgtgtcggcagcacctctggcaaaggtcaaggagaacgatcagttcgagaatgcacgaattgtcgttgggttgaagtacggcgaagctccggacttgaacaatctaaacttcggacgtatcattgtggcatcggacgctgaccagttcggtcactccattgctggtctggtagtcaacatgtactaccgactgtggccagaccttgtcaagaagggcaagatctatcgtctcgtcactcctgtggtcactgttgactacaagaagcaggatctcgaattcttctcgatggaagagtttgaggcatggcgtcttaagcatcagaacgagaaatacagctacaagttcttgaagggacttggctcgtcgtctccgaagcagtggaagaagtacatggacaatctggatcgttatctggtgcagttcacgttcgacgactcggcaaaggaaacgatggacctctgcttcttgaaggaagctggtttcaccgacaaacgtaaggcatggttggatctggaatgagatttttcgacgacgatagcaattttgaaacgaccccggcgaatcagtcgggggtcaccaagctgcgagtgaaggacttcctcgatcgagacttcaaatcattctcggaatacgattgtcagatcaacattccgaacatgattgatggtttcaagatcagtcagcgcaaggcagcctatgtcatcaaccgaacgaacaagctcaacaccgttgagcgatattcggcacaggtggcatcggaaactgcataccatcatggtgcaggcaatctggaaggcgtcatcgttggtatggcgcagaacttcccgacctcgaacaatgtcaattggttcgttccagatggcacgttcggtaacatccttgaccacaaggcttcgtctggacgatacatctcggttgaaggctcgcccaacttccgaaagtggttcagtaaggacgacgacctgatcctcgaatacgagtttgaggatggtgaacagattgagccgacgttcttcattccgaaggttccgacaattctgttcaatggttcgtcgggcattggtaccggttactctagcacgattctgaactacaatcctgacgacgtcgtgcgcaatgtgctgcaggtcgtcaacggaaagaagcagaccaagctggttccttggtatcgtggttggactggtgatatctcgaaggctgatggacagacgactttccgtggcaagtttgagcgtgtcaacaccacgaccattctgatcactgagcttccggttggtgttgagcaggagaagtatcagtcacacctgtcgaagcttattgataagggctggatcaaagactatgacgatgactcgacggaagaggctggttggaagatcactctctacacgactcgcgaatggctcaaggcacaaaccgacgaagacctgatggtcaagttgggcttgatctctcgtgagtctgagaacatcgttgtctgggatcacaagggcaagatcaagaccttcgacaatcctgagcagttggtggagtatttcgttgaggctcgtttggagttctacgagaagcgtcgtcagaagctgatcgaggcgacttctgagaaaattcgttggctgagtgagcgcatgcgcttcattcttttctatctggacaactcggctaccttcaagaacttgaagaaggatgccttggtagaactgttgcagaaaaacaagtttgctgactacgatcgtctgttgcagatgcctatctggaacttgacgaaagataagatcgaagaactttcgaaggcaacggacaacgaaaagtctaccctggttgccctcgaaaaagatacggctaaggacatgtacgttcgagagctgaaggaaatcaagtaggaacttgttctttctgcatcgaaacaatatcatagttttacggtaaccaaacaggactttgtgatgatgatcaggttggacggcgcgaaggttgcattgatctccgctgccgtcgctcgtgttgcaggtagtgaagcccacaagttcgtcattgacgagcatctgcgggcgatttcctctgccgttggcgccgaaggcgtctcggtgtatgacctgggcaagcggaacgaaaagactcgcttcattcgtttcgacttcccgcagggtgaacagatcgaaatcgaagtcggtccgcagcctgagttcgtgaaccatgacaatcgccccgaaggcgatgatgacaccccgggcggcacgcctgttgcgatgcggatggcagcatgatcgagatcatctttgggtgggcgcttcctgcgctcatccttctcatcgtaggtgggtacttcacctggaagaaagcgaaggaagacattctgtactacgactgtcttactcgcgggacgctgctgagaatcccgttggttcttatcgccgctgcgtttccgggcatcaactgggtggctatcctcttcatcgtagcctgggcactcgctgtgtatgaacgccaaatctctgacttcttcagagagcctgtctgcggaaggaagaagaaatgagcatctttctgttcgcactctgggcattcggaagtctcttctgtctcgcctacctgaccagcgtagctaaagaccacatcaagcactacgatttgacggttggcgacctgggcttcttcggagtgatgtgcttgttggcggtcatcccggtgtttaacttgctggcaggattcgttatctttgccgagtgggttgaggtcaccttcggacccaaagcaaagcgcatcatcgatttcatctccaaccacccgatatgggacaaggtaatctttgtctcgaaagaatccaacaagaggtaataccgaaatggctgtgaaagaaaagaaggacaccaagacctacgttggtgcacgcatctccaccaagcagttcaagcgctacctggccactgctccgacgccggaagcgaagcgcgccatcaagtcgctgtacctgagtgagccggtcaagttctacagcaaggctgacctggctgctgagaacgaaggtgtcgaaaccgacctgccggtcaaggcgaagtaagaaatggccatctccaagaagcgcatcgctttctggactgtggcactggccttcggggtagcaatttcgctacccctgggcgccaacgcagaacagccgacccagccgaagccggttccgtcgtatgtccaggccaacgtgaatcagttcaagttcacgcagattcctgatccgtcgaccaagggcgagacttcggtcatccgtttcgtcgactacgaactgcgcaaggtatgctacatccagaagatgtatgtctaccatggtggcggtccggcaatgagctgcctgccgctatgaagaagattcttctcgcacttgcgctgatgatgcctctgtctgcaatggcacagaacatcatcatggatacgaacactcagatgctgacccagtcgatgatggcgtctgcaaatgagccgagccgaccgaagcctacgtcgcacaccttctacaaagagcgcgtgccaggcaagcccgaagaaggtttcatcccggtcacaagaaatgcgcctgctgtaaactatgtgcaggataaggtaagggtcgaaggcaagacgatctacatgctggatgatagggctaagggcatcaagtgctacttcatcacctatatcgccgagcgtgaacctgcaatctcctgtgtgaagtactaactcaactctggaaaatatatcatgaaccgtgaacgtctgatctacatcgctgagtggctggaagctggcgctccgcacaagggcaaggtgaagggcttcgacatttccgtcggtgtgcaggcgctcaagagcgatgcgccttcctgtggtaccacctgctgcattgccggtgcggctacgcagttcttcaacgacgaagatggcgagctggccaacgccgcttttggcttcagcgagtggcaggaagatgatgccaccaatgaagccgagtgggacgctgtcttctatgaagcacaggaccttctggagctggatcataaaaccgcagtcgaccttttcattccggtcggtgcaaccggtatctacgctgaaggcaccaactggtcggatttcaacgacccctacaagaccgcacgcgtcatccgcaatctgctggagaccggcaaggtcgactggagcatcgaataatgaaggcaactctgaccatcggtgtgtctgcctcgggtaagaccacctgggcgctgtctcagccgggcgaagtgctgagccgcgacaactaccgttggtccatcatggaagagaagggcatctcgccttcctggaccaactggaagtggaagtgggaaaatctggtcactgaacgcgttgatgccgacctggcactgtgcgcggctcagggtaaggatatcatcatcgccgatacgaacttgaacgagaatgttcgtggtgcgatggctgccaagctggaagctctgggttacaccgtcgaatacaagttcttcgatgtgacttgggatgaagctgttcgtcgtgataacgagcgtgctcatggtgtcggctattctgttctgcagaagcagcatcagcagttcctggacaaccatgttggtcgtctcgccgcagactctgacaaggggactcgtaaggctgccatcgtcgacattgatggaaccgtggctctgatggaaggcgttcgtggaccgtttgagtggcacaaggtgcacctggacaagccgcatactccgatcatcgatatggtcaagggtctgatggcagctgggtacttcatcctgttcacctctggtcgcagtgatgagtgcttcgacctgaccgagaactggctgcagagcgtcttcgcccctgatggctactggcacggcgactgtcgtttgctgatgcgcgaagcttcggatcagcgtaaggacacgatcgtgaaggaagagatctacatgcgccatatccactacaactacgacgtgcagatcgttctggatgaccgtcctagcgtgtgccgtatgtggcgtgacctgggtctgaacgtcgtgcaggtcggcaatccctacatcgagttctaagatgacggacgccgaaatctataaggcggtaatggcggagctcaaggcagctccgttcattacaaccaatcatgcactcacgacaacgaaatttgcaacgttcaaattcaagaagcgttcgagtgggtactacctcaacgttgacttgcattcatggccttcggagcacgagcgagtacgcaaagaattcaactcatggctttataagaagctgaaaccctatggttgggttccctacaccacttccggtggctgtggcgagtggacctaccgacttgatggaggaatagaatttgacttcggaccttaaaatcaaatcaatcaaaaccgtttactctgccttgaacattcctttcccggaaggtcaggatactcacctgtatggtgtgctgaatgatctctgggaaacggctacgactgttgacgttgaagcagtaaggcagcaggcttggcaggaagggtatgatgacgcacgcgaagatcatgcgtgggacagttcaagctgttgattgacctatccaggtcaaagatgtagactgtgagtgtggtagcggtaacactttattattggagtacgtgatttagatggcacacgaaattactgaacgtgcagacggcacgagtgaaatggcgtttaccggtcctcgcagcgcagtttggcacggacttggtcagcaggttgatgaaaatgcttccttcgatgattggaagcgcatggcaggtttggattgggaagtacatgaatccactgtcgattacaccgcagtaagtgcaaagggtaagcctgagaagcattcgattccggacaagcgcgttctgttccgttcggacaacaaggaagctctgggcattgtctcgaatgacttcaagatcgtgcagcctgatcaggtcattgagttcttccgagaccttgtcgaactgcatggcttcaaactgagtactgctggatcgctcttcggtggtcgtcgtttctgggcacttgcagatgttggcaagagcgagaacgttatcgacaaggatcagattgacggacatctactgctgacaacggctgtggatggaacgatgtcgacccaagcgcgtttcacctcaacccgagtggtttgcaacaacactctgacgattgctctgcaaggtgcaagctctcgccctgtaattcgtgtgactcataagaaggactttgatccgacccaggtcaagatcgatctcaagctcatcgacaagggctgggctgacttcatgaccaatatgcggaagctggcgaacaagaagatgtctgctcgtcagactcgtgagttctttgaggagcagctttacaatccagaacgtcgtgcagacgaacaaacctggggcgtgaaccgcgaagtgacgcgtttgaccgatctggctctgggcggtagtgggtccggttactccaagggcacggcgtacggtacgctgtgtgcgattacggagcactttacacacggttccggcaagcgtgatccgtctcgccagttctgggatgcttatgtcggtcatggtgactcgaagaagcaagacatgtatcgcaatctgttgaaggttgcagcctaaggagaaagtagtgagcgaagtaaagaatgtttctgtaaggtttggtgtacctttcctgcctctgttgacactgctgttcatcggtcttaagctgggtgagatcggtgtcgtcgcaggctggtcttggtggttggtctgggcgccgctgtgggttcctgtagcacttgttgctggtatctggggtctcattgtcggactaggcgcgacggttgtctttggcgcatacatctatcgtaaactcaaaggaaagaagtaatccatgaagaagttctttgtagcaattctgatggctgctgttctggccaccactggttgttccgtggtttcgcctgatcctggtcaggaagctgttctggtcgccaagccaatgatcttcggcaccggtggcgtgctggatgaaaccgtcaagcctggacgcgagtttgtggcattgaccacagatgcgatctatgtggacgtcactccgcagaacatccctgtgaacttcgacgacctgtctagcaaggacaacatccttctggacttcgagacgaacatccagctgcaggtcaagaacgcatcgcagctctacaagaccaagggtcctgaatggttcaagaacaacatccaggctaactaccgagccattgttcgcgatgctgtcaagaccaaggacatgaatgagctgatgtctggccaaaagacggctcaggaagtcgatgccgacgtgactgagaagctggttgcgctggtcaaggaaaagctgggtgacaacgttgtggtgatggatgtctctctggggcgtgccaagcccaacccggatgttctgcagcagatgaacctgacggctgccgagcagcagcgtgccaagacgatggtgcaggcagaattggctgaacaggctcgaaagcagcaacagattgctaaggcagacgcagacaacgcatatcgagacaagatgtttctttctccagagcagtaccttcgtctccagattgccaacatccaagccgatgcctgtaaggcaagcaagagctgtatcgtagcgccgcctggcacttcggttctcgtgcagtaagaaaactttctgcaagtaggagaagccacagaaatgtggcttttcttgcgtcaatcgagaactttctggcctacgaaaaggttgttccagaagtgcctgatctgtagactgtgtgagtggtaaacagttccgaaaacaaatcactccaagaggttccgaaatgtctgagtatgtcgtcgttccgcaggtcaagggtctttcgaaggtgccggcttatgttggcaaccgtgtcgatggctaccagactgtctacctgaccgtcggaaccaaggtgaccaacgtctcgaagttcccctacgaactgaagaagttctacggcacgatcgacggcgtggtccacgtcctctggaaggactcgatcaagcgcgctccgcgtgtcaagaagggagaagaagaatgaaccgctggtgcaggttcttcgccgccctcggtctcggtctggccattgcaggcgggttgactggatgcttcgagcattcgccgccacaagaagccagctatacccagaacggcattcaggtcgagaagctgttcgtcaaggacggatgcacggtttaccgattccttgacggcaacattcgctacgtctactacgcagactgttcgcattcggcgtcggtggcatacgaagagaactgtggcaagagctgcactcgccctgtcgtgaacacttcatccaaggaacagtgatgcgaacctaccataaagacggcacccaggcagcaccggacgagattttcgtcttcggcagtaacctcgccggtcggcatggtgcaggtgcagcaaaagccgccctacagcactatggtgcgaagtacggcgaaggcgtcggtgagcagggtcggtcgtacgcaattccgaccaaggatgaacacatccagaccctgccgatcgaactgatcaagccgcacatcgacgaattcattcgtcaggctggtcacctcttcaacacccgaaagtatttcgttactcgaattggttgtggccttgcaggctacaccgacgagcagatcgctcctctgttccgcgaagcgccgtacagcaatatgagcttcccggaagagtggaaaccctatctcgaggactgagaactgttatgcagaagttgatgcgcgaaggaatcatcattgacaccaagcgtcggcaggagggcaatctctccatccaggttccgcctgtgccgtcagctgaagaacgttacggtgactactgcgccaaactggcggcacgtggattgaccccgaaggtgaacagcttcccgtgggcgtggaagggaaagaagaagcccaagactttcctcagcaagaagcctaagatgcgcaagcgtcgcatggagacggtaccggtatgaacaaagaagaaatcatccagaagttggggcgggcagctgcaattgatatcatcctgcagcgcgaactaaccgaagagcaactccagctcgttctcgaggttatcgaaatctcgatggacctggcggaggcgaataccctcaaggcagttgaactccggaacgcagcgcaatgatcgagcacaagaaagatatcttcttcaaaggcatcatgatctttgcggtcatggtgtgtcattctgaccaagagacatatactgaaggcatggtgtaccgcgacggttatatggctgcggctcggaagttctacgagcacttcggctacatgactgccaaggaaacccgtgacctgttcagcaccgacactccggtctggcctgaatggatgacggaagttttcatggaagtggagcgccgagttttcgacaccaccatctgggacaagcaatgaaaaagattctctcaatcgctcttctggctctgagcctcgctgcatgttcgcgccaggaacttccgagtccaccagaagctgcaacggcagcagcgggcgaaaccgtcacttcgccttggacgaacaaatcgttcgagcatcgtgtcgaagccttctcgaagccagacaagtacggcgtggtatgttaccactatctgtacggtgaccaatccctctcttgcatcaaggtgcagtgatgaaccagcaagaagctcttgagaaattgatcgacgccgctgaccatgcctacaaggtcttcctgagtctggcagagcgcggtgaatatccgcaggagcttctgccctgggacggcgaaggtaaagacagtccgttgttcatgggccatcaaggcttgatgttcttgatcaacgcgatcaaggatgctaaggctgtaaagcagcctcaggctttcgttgcagacatgaagacttccgccggcatggaatactatgtcatgttgggcacacctgagcggaacgattcgctcttcatgttcaagagtcgcagccgtgcagagttcaccgctgccgaagtcaactattcactgggcattggcccgcagcccgacgtactggattacgaagaatgagattcgatatcaccactcgccagccctacagctaccgaacccgaaaggtaggtttcttctgggatacctacgacatcgtctacgatgaaactgtgatccgcgaagtgaaagacgagagtcttgcgcgcgaagtggtcgtgcttctcaactgtgcctatcgcgagggtcacatccaagctcagatggaggcgatgatcgatgcaaattgatcttgacaagccgatgaccgagctcaccgtacgagaatacgcctggctgttagcatggcaggctaagcaagtgacgggaatgcctacaggtgaaagggtgcggtggatggcagatgtggcgatcgcagacctggaagattctatcgaaaaagagatgaaataatggacacgaccttctatcaagaagctatcgacgcacttggcaacaccgagccggaaggcttcgatggttgctcaggcgttggtttcatcgacggttgtaagcggatgggctgccacaacgaagctgacgaggccaagttggttgccttccgaaaggcagcaatcgagcaaaaattcgtaggctgagaaagccaaacaccgctgtataatgcttcgacacactttgaaaaggtaattgatcatgacctacgccgcacaagttgctaccgaactgctggacgctctgcatcacgctcacctgctggaaactcgtcagcgagtttacgagtcgattgctgatctgcgctatgcagcacgccacgaagtcgaagtgatgctgccgactctgaaggctgagatcaagcgcatcggcaaggcgctggaagatgctcgcgagcgcgggctgaaccatggcgacgtgatctacgatgagctggttcgtaccatccgtgaagtgaaccacgctcgtgctcacaaccgtcagcgcatcaaggacctggcactggatcaggcaatcaacaaggctgctctggcagaactcaatcgtgagatttcctacttcgaggctgagggtctcgaactggaagtcgagcagatcatcaactaccactgaggaacaagacatgttcggatctcttctcaaggcagccgtaggcgttgccgtttcgcccatcaaggtagcagcagacgtcgtcaccctgggtggcgcgatcaccgaccgtcgtgagccgtacaccgtcactgctgttcgtgaagtcatggagaacctggaaaacgccaccaagccggatccgctgcggtgaccgcctctatctgggctagcaagccgcatcgcgaagacctctacgctgactgtctcgaccactggggtgcacctgcccagaccgatatgctcgtcgaggaacttgcagagctgatcgtcgcggtacagaagtacaccaagcggaaggccacctacgacaacttcgatcacatggctgaggaaatggctgatgtgattttgatgatcgaagagatggcattccatttcaatcaggaaggtcacgcagaagcgaacaagccgtttaccgaaatggtcgcagattggatggctttcaagtgcaatcgaactgagcagcgtctggcagaatccatcgcacgtcggtatccggaaatcgaatgaacgcactcatggtgacatatttcgtcgagaacggtatgggctacctctttgagcagccctccgagatcgctcgtcctttggcttgctcaatgacaggcaagccgatggcatggcctttcagggtggacaagagctttgtccgagacgacggatatgtccctgtgcttctgcaggaggcagcaaacgcatgatcaatcgatataagctcgacgtcctgctgacggatgaagaggaagacaagctctgggaaatgaagaagaacaacgacccgctttatggtcgtcgtatcagcgaatatttccatgtggttgaacacaatcggggaatgcagtttgccattgatcgtctcaacgaagcctacgccaacgactttgttgatgagtttggcattgacttcctggatggcagcgagtacgcgttcgtcaccgacaaccatgacctggcatcggaactgattcgcatcctcgagctggacttcatctacgacttcaaggctgacgtcttcatctttgatatctgggcatgccacgaagcatggctgtcctatctgtacgagcgattcaagggtcgtgttcgcggaaacatgcgcgcgggtgatgtggcagaacggtatgtacgagaaggctatggcatctatcaatcgagccagtcttatcgtatcatgatcggcgagaatgttgctattccgtcgttcctgagccaattcaagagccgcttcctgagaatctgaaatgaaccttatccactgggctgaccaacacctcgactaccgatgctccttcatgccaacgatgctcaacatcaatggcgaaactgagactgttacagttcgactgaagagtcggcagttgtgtcaagggtcgagaatggtaaccattgtgcgagagtccggtgaggttattgaagtgtacctggatgcccttgagccgatgaccgaaagcctgtattattttgatacgcctgacggactatctggttcacttcttattccatttcctcaggaaaccgacgacggctgctaacggagaacactttgacaatttctgcaaaaatcattgctgattcgattgaccctaacggtaagcgaatcacaacctacgaactggaatacccacgcttcatccattcggagttcatgacccatcgtctgttctcgcgcaatgctgcatcgagccgtgcaattccgatcgacaaggcaattcgcctgatcctggaagacaccgctgcaccgagccattggggcaagaatcagccaggcatgtctgcaaaggaagagcaagatgagcctatccagctgaccaagggaacgcgctattcgattagccgcctgggtgcatggaattgggcacgtgatcgcgctgttgaagctgcgactgcctttgctgatgctaagtatcacaagcagatcatcaaccgtttgctcgaacccttctctcatatcaaggtcgttgtgactgcaactgagtacgacaatttcttctggttgcgaaaccatgctgatgctcagcccgagatcaagattctcgctgagaagatgctcgaggctcgctcaaaatccttcccgaagctgctgcgcccaggagactggcacgttccttactacaaaggcggtcattggtttgcgagtggatatgctcgtggcaatgaactcgaggaagtcgatgacaagcgcggcggaagcactctgaaggaagcactggctatctcttcgtcttgctgtgctcaggtgtcgtatcgtgtgctggatgactcgcttgaaaaggctcaggacatcttccgtcgtctgattgatgcaaagccggttcatgcttcgccgtttgagcatcaggcaaccccgatgaaaactctgtacgatgagactgaaggtcctgtctacaactgggatgaaggtgtaactcacattgaccgctacaacaatggttggtcaggaaatttccgtggctggattcagcatcgccagctgatcgaagacaacgtctgttgggactatcatgagcatcagtagtggaactatcgtcgtagaaacacctgagtctatccgttgggaccgaaccatccgcaattggcgttggtggtcggtccttccgatggtggtgccagcagcattgatcatgtttgtcctctatccgctgcactatgtgctatggccaattggacaatggatctgtaccctgtccaacaagctatactacttcaagcctccgaagtgggtcaagcgattaatggattgggcgatgaagaaatatccggaggaaacagatgaagagcattgaaggcaagtacactctacccaacggcgaagttcttgatgtgcatctgaacatcagcgttggagtcaacacctgggtcgatggcgcatggtgtggcttcaacgaagtgtctcccgaagacttcgcattctgcatggaagagatggcgaaggaaggaaagatcatttttgagcccaagcataatggaaatccagacagtaattgacgacatgaaagccatggcatctaaatgggatgccattggcgcaggcttccaggcaattccgattcatacgtggatcggaatgcttgagcagtatcagaaggaacagaatccgcctgaacctcctaccgagcagaagattgatgactggcatctacctatcgtaggttcggacacctgcctgactatcaaaggtcagagtcgttggttccgttgcacagctgacgattgcggtgcgaacgtcttctctaagacgcgtgatccgaattactatgtctgcaatggttgcaactctggctacgaaacgagcaagggactatgaaaaagattacttcacacaaggaagtcaggtgtaagactcctcaggaactgtctgacctgattgctagccttgctggctctgaatggtcactagcagcattcccttctacctttcttgatggcactgctcaagtttcactcgtgaagatcgatcttgttgaatacaagttctcagacaccgagatgctcgactggatggaacggaacgaggcggtctttagcagcacccacgacaacaccttcatggtttctatgcggctgcgcgaaagcaagaagtatggagctctagcgtgtggtctaactgctcgtgcagctatggagaaggccatgatcaacatcaaaggccatcaacacattttcgaggatgagagatgatatatcaagatgcaagtggctttgttcatcaaactgcaagtatgaccgagctgctcaacctgcgtgaactgatcaatcttcggattgaagagaagcgcaatgaggacaggactcagatttggcgagcctatgacgatgcaatgaccattggttttgctacgaatgagcaactacctcagctcctgaaatggatctcagaacgtgctgagcatatctccgaaaagctcgttgttgagcagtatttctgtgtcaactctgaggttgaggattggcttggtagaggttggttcctctaatggcagtctatgtcgatagcatgagagcgcaatatggcagaatgatcatgtgtcacatgctagccgacaccgatgaagagttgcatgccatggcagacgcgattggcgtgcaacgaaagtggcatcagaaagctggcaccgtccatagccactacgacattgctctttcgaagagagcattggcggtccagcacggcgctgtcgaggtagatcttcgtcaggttgcctatataatacgtggtaaacgccaacgcctaaaaggtgacacaccatgaagaagtttctgatcgcactgatgctggttctttcgttgggtggctgtgtgagccgcgaagagtacatcgcagaacaagaaagcaaaaccacgaacgaccagtgcctgcgaaatcagattttccagcagtgtctggcaaccattccgccgggaccgcagaagactgtctacaacgactggaacgaagttgtctcggagtgctcatctgttgcctactatcagtcgctccgtgttcgtagccaggtgaagccagaatgtcgagcacaatgagagacatccaatccgaagggcgcatcgagaaggcagcacgatacaagtgcgaacttctcggtcttgatccagatgaagcgctctggctcgaagatggtcggagcaagaaggaaaagcgttggatgcgagttgcgcgtgagatcgaaaacttccgactcaacctgcaaattgtatcaatgttccttggcgacgaagtgaccagtcctgtatcataagtaatgtagattcacatcgaggcatgttcaatgagtaagcgtttcgtttcaacaaaagaatacaaggagttggctccggttgcatatcgccagtggcgcgatcaaggcaactgtaatctgatccacggctacgcactgtcgttctatttcgagttcgagtcggacaatctggactctcgtaactgggttgttgactacggcggtctgcgtccgctgaaggatttcctggaagagtacttcgaccactgctatctcctggcacaagatgagccgcactatgatgcgatcaaaaagctgggcgacctgggtctgatgaagatcaccgaagtcgaagcaactggctgtgaagcgattgcagatttcctctacaagtacatcaacactggcttccttcgcgagatcggtgcacctgcagacgtttggtgtcgttgtgttcaagtccgcgagacggaaaagaacatggcgatgcgacttggccatcaagaggacaacgaagacctgaccgtcgacctgtctaaatatcgcagagacggctgatcacggtgtaggcaatggcatcacaacccgcgcatccagagcaacgtaagatccttacgaagttctgtgaacaagaacttgtacgtcagcgggactatctgatcaagaagtataagctgagagactacaatcctcagcttttcttcaattggaaaaggaatgcagtccacagttggggcggatcactcgaggatgatataccattcctcatgctgatgcctcatgagatttggcagcacgtcggcaagacaggaaagtacatcttcaatgagtacgagttcctgcatgacaagcctggcatcggaatgggcagggcgaactggaagcagcacatctcatggaccatggctcacgaattggctcacaccatttgtgagattgagcgcttcgcaaagaaagctaagaaagtcttcccgggacagactgcaactgagcatgatggtcatggacccttgtggcagtctgtctactatgatctccgtgtacatcactgccgcgaggaattctatcctgttgaggagattgacttctcaaacgaggtccactactcgcatcacagggaaaagggtgagcaccgctttgtcttctacaaggggaacaagccattcgcatggtttgtccgcactgacggggtcttctggcagaccacgccccgctggcggaaagcgggcagggccagaaacggggccagaacccctcgagaactgaccagaaatctccagaattcgtgactttttgtcctgagagttgtaagtgtctgattcgtaaggttgtcctcaggacagaaagaacttaatatgtggttgtgggacaaacactcctcaacaaacacaaaggacacgaagatgagcaagttgaccaagacccagaatgaagccgtcgccggtgccgtgaaggcagtcactggcttcaagatgggagcggagacttccggggtgcagcacgtggaagcgggcaacatcaccagccgcagcggtcgtaagtggaagaccagcatcgccttcaccaacgacggcggcaagctcaaggcggacctgaccttctccgaagtcggcgccaagaccgagaccacctactccagcgagaacgccgccggcgagaagctgcgcgaattcatcaagtaccgcggtcgccgcctctgcctgaagggcgcggacatccagcgcatccttcgcttcttcaactccatcgtcccgaccggcgaagccgcgaagccggcgaccaagaagacgaccaaggctaccaagccgaaggctaccaccgaagccgtcgccgaaaccgccgaagcctgagccctacggggcggcgcaagtcgccccacctttcggagaacgaacaatgccccgtcgtatcagtctactcccgcagcaggcactggatttcgctcagctcccgatgatcgtctcaggcgatgacgagctggtcgagaaggctctcctggtaaagaagagcgatctacctggcgcctacgcatacgtcacagtcaccatggtgacgcgtgttgcggggaagaccgaggacatccgggtctgcgttcgtaaggaagtcgaataatgaagatcgtgatccaagtcctcgatggtggctggcaggaccagtccgaacatgacaccattgaggacgcagagaagatgatggacgtggtacagggaggcgatcccgatgcctacgtccgtatggtgcagttcgttccgcgcttcttcgctgagtaccagaagcctctccagctgggcagtgacaggacctacacgcacattctctacgtagccgagtaccctgcggacaggagcatcaagtcctgcaaggcgcacttccggtctcaggtccgcaagttgcctgagttcaatgatccgacgttcaaaatccgtcacgagtacgtcaaccctctgtcgtattgaggtaacctggagatcgtcatgaacatcttcgtcacgcacctgagtccggttctagctgcacggaacttggacaacctgcgtctgaacaagatggtggtcgaaaccgcgcagttactctgcaccgcgcatcacatgaaacaaggcagccgggctaaggttctctacaagcccacgcacaagaatcacccctgcgccatctgggttcgccagagcaacggcaactacaattgggcatatcgtcacttcgcggctctggctgcagaatttgaaagccgcaacggcaaagtccacaagacctgggcagatttgaaggacgtgctcgagaacgctccgaagggcatcaaggatgtcgtccgcactccgtttccgaactgcacgccgcacaaggacatggagctgatcgaagcctaccgcctgaccatgaccgagaagtggcaagcggatgtcgaagctggtcgtacgccaaagtggggtgagagattgacaccaccgttctgatcgaacgccaactagaaactttctaaaagcgccagagcgaaagcctggcgcttgacctatctatggtgcccgcatatcataacggtatggagacattattgtggttggcagttacattcttggggccacttgtactggccttcccgccagcattgaagaagctggtgaactactaccgttggtcgaaaactgtctatgttgaggacctgattggatatctcttccgaaccctgtggccaactctgattccggctattggatggttcgttatgccaggactctacttcgaagagttcgttgaaccgattctcaaaatcaagctcaagggttgatcatgtggccattcagtagtcgtaaggatgcgcaaattcgttctcttcatctggacctggcaaagaaagaaggtgagttgtccaaagcactgaaatcacatctcgaaactctcgacaagtacgagaagggactcaactcccagatcgcgctgcttgaagtggtgagccggtggtccagacaactagaccgagataagagcatgagtgagactgatcaaggcttgttgaaagttgtactggaagatttctccaaggcaatatctgagcattgtcagcacaagaaatgggtcaagactgatcgacccgatccaatgttcccaggcgactggtatcaccagtgtgaagtctgtggcaaattcgactatgaggtctaaggaagaaatatgcgtaagctcgtaaccctgcgcactgtcgcagaaattgttcccatcgaaggcgcggatgccattgaagtggcggtcgtcgacggctggagctgtgtggtcaagaagggtgaattcaaggaaggcgataaggccatctatttcgagatcgattcgatcctgccatacggtgacgaacgttttgccttcttgatgtcccgtggctgcaagatgcagccgactgaggatggcggtctgctcgaaggtcatcgcctgcgcactatcaagctgcgcgggcaggtgtctcagggtctgctgatcaagccagatgttgctttcgctgatccgactctctaccttcgtggtatcaatgtcgccgaaggtccgttccttgactaccgtcattcggttgatggtgaactgaagcgcatctacttcaacgacgaagagaacaatgacctgtcggatgtcttcggcgtcaagaagtatgagaagcctatcccggcacagctcgcaggaatgattgcaggcaactacccggtgtggctaccgaaaacggatcaggatcgaattcagaactgcttcggtcgtgcacctgagggcaagtaccatgctgaagagaagttcgaaggttcctcaatgaccatctaccacgatggcgagaagcttggtgtgaccagccgaaacctggacctcaagctggaacaggaaggcaacaccttcatcgacgtcgccaaggcaagtggcatctttgatgccctgactgcttggattgctcgcttcaatcaggatgacttcattcctcgcattgcgatccgcggcgagctgatcggtcctggcgttcagggcaacatctatggactgacggcacatcgtttcatgatctacgatgtctttgctcatgaccattacctgacgcctctgggtcgacatgtcttcctggaagagttcatcaagccgttcgcaggaaagaatgtaggctatgtccatactctgttcacgatgactcgaggcgaatatgctacgaaggaatcgtacaaggagttcctgggcaaggcaacaggcaagagcattcttgcggacacgctgcgcgagggcatcgtctacaagtcagacatccagcaccgcggtgacgtgttctcgttcaaggcgatcagccctgaatacctgctgggcgaaaaggaatgaacgagcttgtcgcatctctgatcctcggtgtcatcggcttctttgtcggtggcatcattggttccatttggtttgcaggattctttcctgcagcactgattggcctcgttgtagggttctgcatcctgtggtgcccgtgtatcttaatgcatctggactaaaaccatggcagatatctttcaaagggaagtgatcgattcgttccgcggcgaccacgaattcctctctaacttctatcgtgagatgatggaatacgatggacatgtttgggcgactgcggaacacgcctaccaagcatcgaaatgtgccaaacaggatgagtatgatctgttcctgaatcctatgctcactgcaggtcaagcaaagcgcatgggcaggcatgtggacatctggaagaactgggactcaatcaaggtgtcggtgatggtcaaagtcatcgacgctaagtttgaggaaggtacgccgttggcaaagaagttgcttgacacgggcgatgcaatcctcattgaaggcaacacctggggcgacaagttctggggacagtgcgacggcgaaggcctcaactacctcggcaacattctgatgcggcgacgcgacaatctgagactaaagcgatgaccacaacgatccatcacaattttgtcactcacaaagatgtgtggcgcaaggcaattgaactggcgattgagaattcgccaccaagggattatgatcaagatgatgctgggttttggcgccatgagctcaaggcgtttgatgaagcctacgctcagctggaaactcaggacctgatcctgctcccgtaataccacacgccaactcaaggagtttgaaatggcaattgaagtgatcggcaaagacccagcgcagtatcgtgagacgacctgtaggaattgtgcttcgattcttcgtttcgttcttgctgacgtacagaagaagcaggtgagcgattacaccggcgatacggaaacggtctattacgttccttgcccttgctgtagcaaccaagttagcacccgaggctactaatgagactactctgccggttaggcattcacaaatggggaaagtggtccaaccgttggtacaagaagtacatcatgctggacccatgggactttgaatggactgaatatcatgttcacagaagtctgaaatgttcagagtgtaatcatcagaaagataagtttgtcgagaccctgacagaagtagggtctgcgcttaaaggaacgaatcagcctacttgggactgattcgctgttcctagtgcggcggcaagttctgcctttgatgagtccaatgcggttgcgagcttctcgagcagctgtgtcagcatcgtgttttgaattcggagttgctgttctttggacagcagctctttcaccttttccaaacactggtctgcctcagcaccaattttaagaagctctgcttccatgtccgctttctccttgcgggcatcgtctctttgcttgatcaggtcctcgatcaagtttccttctgcacggtcacggaccagctctagcttatcgcgggcgaggcgacgcaagaacatcgtcgctccacctagcgcggctacgactgatccgccaatgattgcaggggtgattggttccattactttaggatcaggttgaggacaattctcttccaggcaggaaggtctttttcttcgtgccactgtctatggctaacgaggtcgccttttggaaatcctgtttcgatcaccgtatcaatgcgtcggttgatggcttcaattgagtttcttgcgtcatcaagacgcttctcgaagctttcgatcgacacctggacttcttgcacgatgataaggatctgagccagtaggctttcggatgcagcttggtccatggtagtctttaagggcggatgggtatcgcgatatttatagagaaactttactgaaccgttatatgcagaggtcgtgaaggaagtctataaatatcgaggatatcgaattgataaggatcgagccttgattaacctagaccaactctatgctcgcaccccggtcactactttcaccggcgccgagattatcgcggtccagaaggatggcgtgacgggtgcatctgttctgtcgacactgaagaactttctgaaaagcggatttgttgccaacgatgtgagtgatgcaacgactgtaggcaagcagttgatgaaggttgcatccgtttcagcggcaaagactctccttgaagtgcctgagccaactccggagcctttggctcctgtttcactgactgcaagcactacccttgcaaagacacacgccaatcgccgtgtctttgtgaaagcagctgcaaccctcaccaccaatgcagctgtaatcgctgatactgacacgttcaccatctacaatcttcatacggctgcggtaacgctgactccgaagagtggtgaaactttccgcgtcaaaggcacaggatcagcatcgacctttagcattcctgcgaacacgagtgtgcgagttttcctaatcgacgccaccacttggttcatcgagaattgatagatggatgacctaatttctcttcccgtagtaacagatgacttcgacggacagacagctgccctcgaccaagccatccgtgaggctgcggttgcattcaatttcagctatttggcagacgctcctacatttgagcagctctaccatgttcctgatcttgtctacaaacttgtcgaacactacacgatgcgaggcttcatctgcacctacgatggtgaggcaggtaagctaaagatcgcatgggatcacccaaatatgtcctggctcgaggcgagggaaattactcgtgcgatcccggaaatgatcccaaacctcggcattgcattccgtgctggtctgctctatctctgcatgaccaacggtaccgacctgcgcgccgaatccgacttcaccctgcagactaagctcggaaaggaaatcaaggctgctgctactctgggcaacctgcagctttccttcggcttcccatctgtgccagctccagctgttcagaacctctttgctcctaccttccaggttttggaagaccaaggctttgagatcacctacagcgcaaatgctaacatcttccttttgaagtggggcacaagcatggcattgaactttgtatctgggcaaacactcgaggttgtgctgtcttgaaaggtctcgtaatcggcaagccacactctggcaacgtctgcattaggtaccgtgaggatgcgtcttctacggacttcctgccactgcaaccaaacccgtctgagccacctatcgtcattcctatcgaaggaactggcgatatgttccgtgcgatctacgacaaggatgctaacggtgtagttgacacagccgatgaagttcctgtctcgcacattcctggccttcaggataccatcaacgacatctacaaccaaattggttcgggtggcggtggaggaggaaactcacaggtcatcttcgtaaccaacacaggtggcgagacgttcctacctggcatgcctgtctgtaaggtcggtagttcctacctgcgtgctcgctccactggtccaagacagacatgccttggccttgctgttgatgcgtcaaacccaggtgaacagctaaagattcagcaggcaggtctattcactctttctcctgaaaattgggacttggttaccaatcaggttggtggccttggcacgacgatgttctattacgtgaacatggattcgcaattgaccatgactccgcctaccgacttccctgagtaccttgtaaaggtcggctacgccttaaataatactgacttcctgattgaccttgacttgtcaatcaaactataagagacggacatggcagacttcaaaccccttaagctaggctctaacaacgagctgactcgcttccagaccggagacagcgtcggcattgacgccggtggtaccggttctactacagcggctggcgcccgtacagcccttggccttgccatcggtacggatatccaggaacacagtgacaaacttgacacgctcgcagcactagctggcaccggattcctggttcaggacggcgcgaatggttggcttgcgcgtaccgtagcgacggcctctacaactcgactgactgttaccaatgcgaacggcgttgcaggcaatccaacgttcgacctcgccacagtcaccgacagtggtacaggtactttcaagaaggtaacggttgacggatacggacgcgtaactggcacttctaacgtaacgacagcagacatcacagcgctcgttgactcgacctatctgaagctgtcaggtggatcgctcacaggtttcctgacgctgcatgctgatcctacgaatgcgatgcacgcggtcaccaagcagtacgttgatactgtgatggcgtctggtggtattcctccgttcgctcctgcaaaggttcgtaccacagctaacatcaccctaagcggtgcacagacaatcgacggcgtttcggttgtcgcaggtgatcgtgttcttgttgcacaacagactactgcttcccagaacggtgtctatgtcgttgcggcaggtgcatggacacgcgcaacagacgcggatcagactgctgagttctctcctgcacgtcaggtatttgtccagcagggtacactctatggcttcaccacatggggcgttggtaacacgactgctcctgtcatcggcactgatgcaatcacattcgtgcaggttggtggtgctgctcaatacactgcaggtaacggtctcagcctcacaggtacgcagttctctgcggtgggcgtttcagggcagatcactgtcactggtagcggcattggccttgcaacttcgggtgcaacggctggtacctacaccaaggtaacggttgatacctacggtcgtgtcactgcaggcgcgacagctactccagccgacattggcgctcaggcttcttcgactaacctcaccgcgctgtctgcctacaacacaaacggcttccttgtacagtctgcggctggcacattcgttggtcgctcaattgctgtggcttcgactacacgtctgaccatcaccaatggtaacggcgtatctggtaacccaacacttgatctggctaccacaggcgttacagcaggtacctacaacagcgtgaccgttgacgtctatggtcgtgtcactgcaggtacttcgactgcttcggatcaggttgtaacctcgctgacaaacggcaacgcaggtgcgatcgtcattggtcgtgcagtctacatctccggcgccaacacatgtgatgtggcaaacgccaacaactatggcacggcaagcgtcattggtatcgcaacctcggtgacaaccgcatcaggtgcagcagtgaacgttgctgtttccggtgtcgtcactgcgacaactgctcagtgggatgtggtaacaggtcagtctggtggtttgaccacaggtgccaagtactacctctccaacacaacctcaggtgcattgaccacaactgctccagttacaggcatcctggctccggttggtatcgctgtgagctcaaccaagctggctctgcgcctcgagcgagttgttgttctctgatacacaatcaaacatcggttgatacggaagaggagcctagtgctccttttcctttgaataaatatcgctgtattacaggacagaataatggcctccatcaagcctctttatatcaatgcagcaggactcgaggctcaggcagcttcgggcgacacagtaccggttgattacggcggcaccggtctttcctctctgactgcaaacagctatcttcgtgcggtgtcaagctcagcctttgagctccgcacaccagcccaggttcttgctgacattggtgcgctgtctaccacaggcactgctgcttcggcgactatccttgcgactgcgcgtaccatcaacggaacgagcttcaacggctcagccaacatcacgacctcaacttggggtactgctcgtaccttgacgattggctcgacaggaaagtcggtaaacggttctgccaacgtggcatggagcctgactgaaattggtgcagcaccaactgtccatacgcatgtatctgcagacattactgatctacagacacagctaagtggtcgagttcagcgcggcacgcttcagttgaatccggatggtacagcacctgccacattcttcaacgaagtctccgacactctcgcactcaaatattctaacaactctacaggttccacaggatacccaaccgagtttggtgcgaccctgtctgtgatcatggaaaagcagtcaacacgttcgtttgacctgcatatgccaaccaactcggctaataacctctacttccgaggctattcgtcggcaggtacaccaactgattggaagaccattggtgccctgcagaataccaacacctggactgcaaagcagacgttcgcaggtggagcgaatatggccaacgacgtactccttgagtacggttcgggtggtgcaacaatccgtggctcgtccactgggtcaatcatcctggcttcaggtgccgctgctggtgcaggtattcgccttcgcccaaacggtgacactagcctcactggtcaggttgccattgacactgatggtatcgtagtagcaacaggattcagcggtccgttgactggcaatgctacaacggctaccacacttgctactgctcgcacaatcaacggcacatcctttaacggatcagctaacatcactaccgctaactggggtaccgctcgtactctaaccatcggtggcacaggaaagagtgtcaacggctctgccaacgtggcatggagcctggctgagattggtgctgcatctgctgatgacatgcttttgatcggtggcgacaaccaaatcggtaacggtaacttctacacaggcacagctacaggttggtcgggtggcagtggtagcatcggaagcggaactgctgttcgttctatcgttgatagcactcttgcgagtacgggtaaggcatatcgaatggatattgccaacttacctaccgcaggctacattgaaatcatctctaacaccaacgtcaagattgctcgtgttcagggcggcgaaagagctgtcgtcgcagcatacgctcgcggatcggcaggcgttcgtgtcttcctgcaaatccgttggaatgatgaaacaggtgcagctatctcctacactggtacacctaacaattcatcttacctaacgtctgagacctggacaaagtacacctacagtgctacggctcctactaatgctgtatctgcaaacctttatgtccgagtctacggcaacaccgcagctgatcaatggttcgagacgagccatatctcaatgcaggttggcaatgtaagcacaggatatgctccatccattgatgagctgcgcaacgatttcaacaacctgatcaccactccaaatgtctggaatcaattgcagacattcaacggaggctggaccctaccaaacaacaagatggggttgctaggcactggcggaggttcgatccgaggaactgacacaggtagcgttgtactgtcttcgggaacaggcggcagcggtttcatctacgttcgtcccaacggtgataacagcacctcattccagacagtgttctatgctacaggcaatgtggacatgccaaccgttcgtgcaggtgcatctactcctaatgcagctggagctgtgatgcttgaacttgtgtctgagcgctcatggcagttccgtcagcgcaacacaggtgcgacaactcagctagaattgtttgatttgactggagctaaggactttgtcctgtccaacacatcaaacacgaacgtcattgtgatgaacccgacgaatagctcgatcagtgcaacaacgttcacaggcgcattgactggtaacgcgacaaccgcaacaactcttgcaactgctcgaaccatcaacggtacatcgttcaatggttcggcgaacatcactacatcgctttggggtactgctcgaaacatcacaatcggttcgacaactaagagcgtcaacggttcggctaacgtgtcttggaccctggctgagattggtgcggtagacgcaaccggctttgtcaagaaggtcggcgacactatgagcggtgacctcactgtttctgcaaatgtcagtggtcagatggttcgtgcaggtttctctgccgaccttgcatttgctcaggtcagaacccttggcgacggttcaagtatcgtttggtgggaatccatcctgaagagctcaggcggtccaggaggtgagtcttggtaccgtgcaaagtctcacgtatggacgaacgatcagggtaacatcagtgctactctggacacatcaggcacctttaccgcatacaatgttcttgctgcaaaaagtttctctgtcacagattcaaccgcaacaagcttgatccaaggaaacctggctatcaacgatagcctaaacgccaggggcgtgatgtacttcggtggtaaggttgccaacaccggaaacaagctccgtatcctcaacccagattcttctacctctttacgaattgatgctgtgactgcagatgcgtctgcatttgcgcagatgaacttctatgcatctcagttcacattcatcgttggacgaatcggattcaacggtcaccttaactcgacagccactgcagctgttctttctgctcagaatggcggcacagtatacctgcgaccaaatggtgctgacagcgacactggtgcgacaatcatcggaaccaacggtgaaatgaatgtcagcggtagcatccgacttggaggtaacggtcgtaacattcgtttgtatgataacaacgcagacactgcttgcgttgacattggttcgggtattggtacaggcactgaccgtggcggatatatcatcaaccgaaacgctggaggtgaactatctctttgggctcgtaacggtggtgtccagctgcgcctcggtcttagagacggtgttgcaggtgctgtagcacagctcaacgtccctatgctcttctctgcaccagctatggatcctggaaacgctgcaacctggtcgatcctaactacaggttcctacggtggcggtatcggtatgcgagacaatgcaggtagcggaaactacttcggtggcatgtatgtcggctccggtcagatgtacatcggttgtggtgcaccaaatgaggcaggtattcgtgcttcggttgtgatcaagaacgattaccaatggtacttcacaggtaacactatcaacatcgaaggttcctcgcctactatccgtgtctacgataacgatcaaggctacaccagctggatccaccacaacgacggtaaccatggattcctggcacacaacagcttctcctgggcatgtttccgtaactcagggaatgactggcagtgtcagaacaacatcatcgcctacgcatctgatagacgccttaagaagaacatcgttgatgcaccaaacgatatcatcgagcacttcttcgagaatgtccgcatccgacagttcgattgggatgaagagaagattgctcactataaggtaggcatcaaggcacgagttggtgaggtgggtgctgtggctcaggaaatgcaggcggtctattctgacgctgttgcagtcaatgaggcgcacaaccagatcaagaccaaagacaaccctaatcctttgaagccagacttcttgaccattgactggacaaagactgttccgcttctgattgccgaagtacagaaccttcgccgcagagtagcacaattggagaaccgagcatgagctcacgagtaatcacagaagaaagcatcacccgtattcgcgagactgttgcacctaacatcacgattcaatgggatccagtaaccaatggaggacaggtaacgttcttcatgcaggatcagatcacagagaatggcgtctacaaaggcatgcaacctcatcaaggactgcgccctaaggagaactctcttgatatgaagggtgtgctcattgtgcctatggaagagatcatgaactcgaccattgtgacatcctcaggtgaaacgcctggttatgtgctgatggttcttatcaaggcatactttgagcaggtattcacggatcgtctcaacaatcaggacgctgcggatgcactcaagggcggtacaattcctgtcgaagagaaggcgagcctctaatgccaattccaggttcgggtgcaatctcatttgcagatctaagaaacgagtttggcggtggtaaccctgtaagaatctcagactacttccgcggcggtccgcgagttccaaacacaggaacaaacgcaggcgtaccaacaagtggaatcgtctatctgtcacagtatcgaaatgcgagtgcatctacaccactgactgcatcggttccggatatctacgcatcgcgtctcccaaacggttcggctacacgttcaacaacagtgactgcatctggtggtacaggttcctacagcctcaccaatgctgttcttttgtcaggtagtgcaacagtttcccgaagtggcatgtctgtcaacgtgacagcatctgctaccaacgctgagagaaacggttcggttcgcgtaaccatctcagatggtgcaaccactatcactcgcgacttcaacttctacatgcaattcggtacgccgctctaagcctgtaaataatggacaacgtaatgatacattgcccggagtttacccaatgaagtttgccgcattccaaaacccagctgtttttgatcttctgaaccgcctattcgtggctcaggtgcctgtcaaggtcgcctacaagctcagcaagatccagaaggctgtgactgttgagtcggaacgttaccaagacctgcgcatgaagatcgtgtccaagtttggtaccaaggacgagaaaggtgagctcatcgtcgacgaggcaggcaatgccaagatcgaggatgcagccctgaatgacctcatcgaagagatgaaggaactacacgacattgacgttacgctagagaacaagatcaagctcgatgacctcgagaaggttgacctctccgcaacggatctgtctatcctagaaatgttggacatcctagaagagtaaagatgcaaaagacaaaagttggtcgttatgtctggaatatgctgatcgccattgatcagtttttcaacacagtgtttggtggtgacccagatgaaacgatcagcagccgaattggcaagatcacagctaaccgcccgaagtcttgccaattctgtgtcttcctttgcaaggtattgaacaggatcgatcgtgaccactgtaacaaggtcattgaactcgaccgaggttggagagaggtaatcaagtgaccatgagcactgaaactgtagcaatcaagatgggtgcacctgcggatgtcgcacgagcactcgagaatgcctgcatcaagtttggcatcacaacccagaatcagaagtcgcacttcctcggacagatctttgttgagtcgggtggcttcaagacactacgcgagtcgctgaattactctgtcgaaggagtgatgaagacctttagccgtgctcgtatctctgaggctgacgctaagaagtacggacgcactgcaacccaaaaggcgaaccaacaggcactcgccaacatcctttacggtggcatgtggggactcaacaacctcggcaattccaaggaaggtgatggttgggcgttcattggtcgtggactcaagcagctcacaggtcgctccaactacacagcttgctcgcttgctctgtatggtgatgatcgtcttgtaaagaatcctgctctacttgaacagcttcctgatgcagcactgtctgcaggttggttctggtcttcccgtggactcaactctctggctgagtctaactcgtatgaacaggtcactcgcaagatcaatggtggccttaacggatacgattcacgcgttgcagcaacaaagaaggcatacgcgctcttcgaatccctaaagggctaagctatgtctcaagcaacacttcaagccgcaactctagctatcctcgcaggtggcgcatcctggacacagggcgcccttgcacgaaaggctgatggtctaccatgttccccgttcaatgaagatgcagttacatgggacatgatgggcgctctgatcaaggctcaactcgaatccgacgagcctaactggaccagctatcatttggtctacaacgcacttcgagatgctctgcctgccgactacaagagcagagacatcgaagcttataatgatgacgcagatgtcgtatggggcgacatttccgctttgttcgcctgattcaatcgaatcaactcaatccaacccagactcaaaattgaatattttagaaatattctgagcacaatacaaggttgtttggcgtaacatttctgttaccctaaacggcactgtaaaggagacagattatgaagaaatttgtaattttgtttctgctgctgatcacttcaactttttcaacattcaatacacacgcagccgaaacgatcatcatgcccgaagtaatcctggcacctgcgccagagattgtcgtggatacatccatcaaggtacacactttcgtacctgacctctcagagccagacatccttgtcgcagctctacccagtgaagcagagcttcgttgcctgcagaaaaatatctattacgaagcccgaggtcagggcaccagcggaatgacagcggtcgccaatgtgaccatgcaccgcactcaagacagtcgctatcccagcacagcctgcggcgtcgtcaaacagaaaagtagaggcacctgccaattctcttggttctgtgatggaaagaagagtggtggccctagccttcgacaggcagcagacgttcgagcatgggagctcgccggtgagattgcactaaaagcactcacaggcaccctgcgtgatatcgtcaacggtgcaactcacttccacaacacgtcaaccaatccaggctgggctcgaaagctcaaccgaacggcacgaatcggaaatcacattttctatcgttgacctgttagtctaatttggtaaccattcttcggagcgaaagatgcactaccacccgcagcctgataccgcagtgttcgtagttggagcccatactctttcgacgacactgcgatggctcggaaaagaggcaaccgttgacatcacaggtgagaaacttcaagacgtgatgcgacgagttgaccgcgcaactttctacaacaacggtgaagagaccgattgttctttctacgccgctctgtagactacgatcatccaaacaggaatttgaccatgtatctgcagttgtcagactttgaccacctccgcgaaaacccgaacgtgcgtttccgcgaagagaacgtcgccggtaaagatgtcgtcatcatctcttatatgctttccagcgacgagctgtggaagctgccgctcggtgtggaatgccgtggcatcaccttcgatgcccaaacgggtaagctgatctcgctgcctttcgagaagttcttcaacgtcaacgagaaagcacatacccaggctcacatcatccgtgactacaaggtgcaagctgtcctggacaagcgcgacggttcgatgatcactccgatctgggctgacggtcgtatctatctcaagaccaagaagaccttcacctccgacgtcgcagtggcagctcagcgctccctgtctgtcgagctggaacgcttctgtgaagccatgctcgaactgaacttcactccgatcttcgagttcaccgatcctgactgcaagatcgtcctcgactacggtcatgactctcagcttgtgctgctggcgatgcgtgatatgatcgacggttcctatgtctcgtacaaggacctggaccagatctccaaggcttggggtgtgcaactggtcggcggctataacgctgactataccgttgatggctacctcgagctggcaaagattgccgagggcatcgaaggctgggtcatctacaccgatgaaggtcgcttcaaggtcaagacgaagtggtactgtgatcgccatcacctgatcgatattcgtgaacgcgatatcgctgccctggtgctcgaagagaagctggatgacctgatcccgaacctgctcgcaggcgatgcggacatggaagccatccgtgagatcgagcgccgggtgaccgatggtatttcccatatcatggaaaccgttgccttccttggtgtccacgcaagtggtatcgacctgggtaaggatcgtgccgattgggtcaacgccaactgtggcaagctgtcgaagtttgtccatcgtgctgctcgtggtgtggagaactctgacgagtccttcaaggagttctatcgtcagcactatctcagcaccttctcactccgttcaatcggcaaccccaatttccgcgacgaggaagaataatgaagtacaccgttaccattctgttcaaaggcaatccgcagcccgtcatcctcaatgaggttgaagagttcactgtgaagtatgaaggtgataccatcaccaacctccaatggaagctggcgccaggacagaatatgctctacattgacctgagtcagatcgcattcgtgttcgcagtcgaggacaagtaagaccaaagttcctgcaaccacttcgtaccaaaacccctgagacccagagcccttgtaccccaaggttctctgggtttcctacgtaagtgtctgattcttggctccaaacagattagcaagtgtctgatctataagattgtcctgtcctacgaaagtctttaatatgtggttgtggggcaaacatacagcccgaaacgaaaagacaaaggaacgcagacatggccaagcacgtagaactgactccgagcaagacctacaagactccggaaaacgctcataaggcggtggagaagttgaacttgccggacttcgtcggtgaccgccagctgcgatacatcatcatgacgcacaccgacggtcgattctatccggtgttcctgggtgaaccggcgatgcaggcaggtgttcacttccacttctgtatcctgggttaaggagaagatcatgagtaagatgcgcatcctgagcggcaagaccttctacatcgaccgataccatgacgagcaggtcgagcggcacatcctggtcagcctcaacgcacgtgagcgcaaggccatcctgaagaacaggaagacccgctacaacttcatccgcaagctgcaggatgccggcatcgtagagcgcagtgggtgccagtgcggtcactgcatgaacggttgggactgctgcggcaggtggttcatgtcccgggcgaagatcattcctgcgccgacgggcgtctacatcgtcaagacttacgagaggaacatctgatgaagaccaagaccaggaacattctgattggcttcgtagtagcactgaccatcggtgcactgtggatgacgaccccgaccgaatgcacgcacagcggttcggtccccaaatattgcgtggactaagatcatggaacacaacgcctggctgtataccaaagaccgtagcgagctcgaggacttcgccatcggcatgggcattgacccggagcagtgctccctcgacgaatccctgattgatgcaatcatccagaagctggaggaacagaaatgagcaggcagtttgtcatcctcaccaagggcggtgagcaggtcgctgagatcgacaccaacaccttcgccaagatcatggctgggaaccgcggcgagatgcagctggttacgacgcccgcaggtcgtggtgtcagcgcctttgtggtcaatcagccgcacagcttccaaattggcggcacggggctgaccactttggacatttcgatcgcgatggatgcgggttatcgcatctaccgttccgaggatatcttctaatgaaggtcgagaacatcctcctgcaggaatacagcggcgaggctgtcaaggacatgccgaagatcctcaaggcccatcacttcatcatggacgcgaaaaacaacatgacggaacgcgccatggtgtatcgtgatgtggctcgccgagctctgggacacgacgtcccgatggacgtttccgatatcgaactgatcggaacctactaccaggagatgtgcaatgtcttcctccgtcaataaggtacgcctgaccaagtggcagcgcggtgaaatgtccttcttggtctccgtgatggaggagggcttcgacgacaacggcgacgtgatggaaggttacatcgcgcagggctacggctttgaccgtgctgaggaactgaccgacctggacaagaagctccgcttcaagcgccaggcaggctccttggaagtcgaactgaacatccgcgaagccaggaccatctggcacgaattcgacaaccgcctcgatatcgagctgagcaactcgtgcagctcgaatgatgaacatggtcgcgcctaccgcaagctcaaggatggtatggcgcgtttggaagcagttttcggcagtgacgtgaggaagaagcaatgaacccggaagatctcaagcgtatgatgttggccagggcaacgaatgcagcacatgcaatgtggggcgcaaagttctgggttgatcttccggaacaggagcgtgagaagcgactgaaaaagatcatggacatcctcggggagttctcctaatgctccgtcgtttcttcaatcgtcagaagcctgtcagcttcgaggcccctccgccgcagggtgatatgtatgagctctggctcaaggtcggcaaggtgcatatcaagtccgcatccttctgtcatcgagttgcggtgcagttgatgaacctgcgcggtgggaagtgggtggcccagcccgactaccacggcgacttggtaggcgtctacaccttcacccaggacttcatcttcatccgcgttcgtgatgatgggtatggtaacgagttgcagcggattgagatcagcatcagtgaaggctcctacctccggattccctgaaaactggcctacacatcgtcttaacgagtggtctatataatgcagatgccggcagaaactttctagtccggcaccaaccaaaaggatcatcgtcatgtctacgctcaactcccccgctcatacctacgccaagccctccggtgctgtcaactctgtccgcaagatgcatgtggagcgtggtggtgaggaagtccgcttcgtcatcggtaaggaccctgcaacaggtcgctactttccggtcttcatcgaccgcatcaagcaggtgagtgatcaggagatcatggccaacccgagcgccaaccaaacgggtcgcgcaaagaagcgagccagcgctcgaaaggctcctgcgaagaaggcagccaagaaggcgaccaagcggacaacgcgcaagaacacgctgcactgaaacgaaagtttctgagagaagctgcccgtaagaaggcagcttttcttttggctgtttttcgtgaccacacaagaaaggaattatctatacaatttgtatatcgacaaacggagcaccaatgtgaagttgttcaagaccgccatcgccaagctcaacgccatcccgagaaagaacatcgaacgtgtcgcggcagttgtcgtgttcactgcggtgactggcgggctggcacattccttcatcaatgatggtgggatggaattcttcaagccgaagaccgttgcggtggctcaggttgatacctatgccaagccgatcgtcgaagagggtttcttcctgaccaagacgacctggcctgattacaaggacacggtgtcggctgagcagtatgcgaaccaatcgcagatcgatcgcacccacctgggtccgtgcagcaaggacaagccgtgcgagaagccgaagagctatctcgactataacctcccggactacctgaccaagtaaggaaacgagcatgaacccgatcgttgaaaacgcatacacctatcgcatccagaacgattctgagactgttgtctggaagtcccaggctcgtgatgaccgaaaggtagaagccatcaagtctttccgtgccgccaccggcgcaggtctcctggaagccaagcaggtcgtagagcactacaaatctctctacgatcagaagatgcgcgaggttggttcgaagcctgccaatggcagccgtatcgtcaacctgcgtcctggcactcgtctcgtggtcgccgaagatgtgcctgggttcttcaaggtaaaggagatcaccgagcgcgacctcggcattgtggacgagtatgatctccttcagttcattgctgatgcggcagcacgtctgggcggaccggtggcgtaatgcctttcgtacttcatcaccgccgacaggccagccctctaccgatggtaaaagaatggtctgaggtcgccggctcctattccgaaaccatggaaggtgtcaaggctgagatggaatggtgggaccgttataatgagcaataccgactgacggattgggaattcaaagtggtacaggtgaaggcgaggaagggatgatggaaaacgatttcggcattgactatcatctcaacatcatgaacaacgggcgaccaacgcctgaggactatctccctcctcgcccagagaaatgcctctggaagatcatctcgttcgatggctactatgccacctaccgcaccgaatgcggacagctggaagatatccgtgctgaggaatgcgttggcatgccgatgatccccgagcctcaaggcaagtactgccatcattgcggtggcaggctgcatgtgaactcgtcgttcaaaaggaagacacactgatgaagttctacatcgtgggtggcgcagtccgagatttcgtgctgggcaagcacccgaaagacatcgactacgttgtggttggtgccactcccgaagacatgctggacatgggtctgaaacaagtcggtgccgacttccctgtattcatcgacgatgagggtaccgaggtcgctttggctcggaccgaacgaaagactggcgtcggctacaacggcttcaccactgaccacagcaagactgtgacgttggaagaggatctgtctcgccgtgacctgacgatcaatgccatggcaatggatcgggttaccaatcagatcatcgatcctttcaatggtgagaaggatatcgaggctcgcctgctgcgccatgtctctcctgcctttgcagaagatcctgtgcgtgtgctgcgcatcgctcgtttccgagccaggttcggtggagagtggaccatcgcggatgacaccatggcgctgatgcaggctatggtacgccgcggcgatatggctcacctgacgaaagaacgtgtgctgttggaaatggacaaggcattcagtgagccttatcctgagctgttcttcaccacgttgcaagagattggcgccttgaaggttgtcttccctgagctggtgctggttgatcacctggactatctggaaatcagaaaggcagctggtgcttcgcctgcctacatctatgccgttgtcgccctgtgcatgtctgaaaagaatgcgctgcactttgaagcgcggatgcgagtgtgcagtgattggcgccgaatggcacgaatgtatcgcatcatgatgagctgccgtatggacagcaatcaggtcgacatcctgtacaagatggatgcctacaggcagcctgagttgtgggaggacttgataaggaacatggccaaggttggaaggactcgtgagagattcttcaacgacctgttcgttgtctggtccgccactcatggcatgggcttcatgaacctgaccgaagagcagcgcagcacgctcaagggtccggaaattgctgaggctatcaaacagctgcgcaagaaggtgatcaatgaaactcggtgacctgctcaacgacaatcagctattggatctcatacggcacatccgcgccgtgcatgatgaaaccaatggacctaagaataagcttgcgcgcgaactaaagcaagtgctgtccgaattcgagttcgaaccgaaggtgatcaatgggtaaggtggtcgtcgatcaaggcgcactccgaatggcactcaatgtgctgattcgggcaggcaaaacggaagtggctgaggagttggaagcctcagccactgactatcctgagctgcctgcggacggatgctatatcgtccgctttgatgatgccgaaaaggcagacgcagacttctgcggatacgacgctcgagatgcagcattgaagtactacgatcacatcgcttggaattggaacgggcatctctatgtcaagatcgattccaacactcgcgatgcggagaagcagtttccgtcactcaaagtggcagacatacatcgcttcggtcgcgccaacccatcacaaggtgtggccaccacttcccgttgatctgatcattcaaccagacacgctcgccgttggcatctttctcttcaagcacattgaattggaactggtataggatttcgcagaagttcacatctcgcttgagctcatggagggacaagatgtctctcctgattccttttgtgccattctctttcacatagttgttgatgaactcagaggaagagaagtaggtcatccaattggacgctacctttgagcggcgcttctttcctttctgtttgcgcatgccgttgaagaacttcttaccaatgtacttcttgccgttcggcattgtgatcaggtagacgaaaccttcgtagccgtcagcgccttcctcaggaaaaggctgaccacggaagtaccagggatcacactcaatcactttctttgcacgagccatatcacagtcatctgttaggtaggatgagatatttaacctcggtccctacacagtcctgcagatgttaaaaagatgttaagcggaccaccacagtccaatgactctacgggacgcccagcttttaagcgctgatccagtaaccccttgatattactagcattctggtcaggaagggcaggcacgtaagtgtctgattctattgggctccagcactcaggggctgtacagatgacgggtcagcgactgtcagcaatgtggttgcgggctccttaacggatcctatacactcagggtgcctgacgtctgagtcaggaaatcgggggacaaaccagtttagattgtgaggagagtgtcatgccgcagccgaggtatccgatgatcgggatagtggtagccgtagccactgattgggagttggtgaaggaagtgaacaaggagcttgtcctacatggagtgagtcctgaggcaaggcgagcattttggtttgaggtcctcaaggtagacaacgcgttgaggatgggtgagatagcgcgagagtgggtcacggtacatccaaccatccaataaagggaaagcccggaccgttgagcccgggctttattgcaactatcaaccgccgaggttggtcccggcattctgtgctctctgattgtcggcactcgatccgatctgtacccaacgtcggtattgaagtgttgtggtgacagtctgataggtacctgagttaccgtaagcaatgtccatggcgccaacggcaatcggataagcctcctcgagtcgaacaccataggtcggctggtccatctcattcaagttccacatctccacattggctgtgaactcgttgtagaaattgagcgtgttggaacgcacattgatgacggtgttctgccataggtcgaagtatctacgggtgtctgcatcagcatcagcgtagaaggagaacgtcacaggatcgtatgcctgagtataaggaacacggaacgatgagctgttctgtgcgcgttcggatgtcaccagattgcgctgcgggaagttagccgtgtggcacttgatgttgatcgaaccgatgccattgaaacgtgcttcctccaactgaaggcgtccgcggcgtactcgtgcatcaatgaaatcagcactgccacccacaccctcaggcagcacaaatcggataaggtacttgttcggtctcatcactccacgttggaagtgagagaggaacttcatataaagggtctcgttactcatgccagtcctgtcttacgccatacctggcgggctgtttgtttctcaaattgctgtagcggaagcatcgctacctcttcccagtactcgtccgatacctgtaccaaacgtgatgtgacgtgtgatgcaagatagcgatgaacacatggtgcgaagtattttgacttcacgacgttcttaaggagcttataggacacagccatataagccttgtcggttccggcacgcttacgatactcgatgagcttatccatcagcttcgcacgcatcacgggtggtaggtaatgcaggttgagcccaagccatccgtcggaatacatctcgacaggaatcacacagggaacagtatcataccagggcagtacatctttgtacttcggatcgtaggtatagataaacatgccaccaatgaaggtagatgagttgcgcttggcaccaaaggcctcttcaggaactttcgcacgcttgagcttggacttagccatggtatagaaccattcgattgccttcgccgtacgcttacgatcatgaaggatcagcttttgctcgatggtctttttaggctgcgcgcccgttctatttgcagtcttctttacagtagccatatgttacttccttttggcaatgcctaaatcgtattcggtcatcaccttgaattccatgccatgcttctctgcataggccctcgcggcagtccacttatcctgatttacttgataggtaacgcactcctcaagataacgctcaggcttcttccttccctttgtaggagcgatagtctgggactcaggtttgatctcaatcagcatagtctttaaggaaccatcagacatcttcaattgaatgatatagtcaacgaagtagcgacggttcttacactcagccgaggagtaatagggaatgacgatctcctcactgttccactttactacggaaggattgaggtcacaccatctattgaagcgaagttcccaggaagaacgatacaccacatcattagcattgcctacgtacttttcaggatgaagtaggcgatagcgaccctgttgatacttgcgtgccattgttaaatcactcgtttaggtagctgcatagggattcagctataagttgataatctcggttgaaaacaggctaagaattgtgtgaaagaaacaccatagccgaaggcacctgccttttcgcctggattaaatatctgtagacttctatatttaggcatacgattgtggcacgccaacgatcaaacaaaacgctatacagttacccacctgacctctcggacgagtcagtacacccagctgcgatcgagttcaagttctttgagagaagctcccctagggaaagcagtcctttgaatacggtccatctgtatatgcccgaatcggtagcccagccctctacggttgactggggcgactcaaacctcgggttcatcggaaacgctattagatcagctgccaacggtgctatggcaggactctcgggcggtctcaacgtaggtaaggctatcggggacgctgtaggtatggcaggtgatggtatgcagctgtcaggtgcctatggacttgccaacctcggaagtgctgccgctggtctaatgggcggtaacgttactgcggaaggactaatgggcgctgtggctggtatgatccctaacccgtatgtgactgcgctgttcaaaggcgtgggactgcgtgagtttgcattcgtctttaagttctatccattccgagaagaggactgccaggagatctacgacatcatctctgtcttccgtgagaacgccttgccttcatatagtaaggactctatggggacaggcaataacaaagcactgctcaacttcccatctgagtgtgacatccgttacctatggcagggaaaggacaacgagtggattcaaaagttcaagcgttccgtctgtacgtctatcgacattgactacactggccaaggtatgttctctactatgcgaaatggcttcccttcggagatcacaatgtctaccaagtggaaggaactcgagattgtgacacgcgaagacatcgtggagggttactgatatgccatccttcttcaagaagtttcctactctaagctacactgtagatgggtacaacaaggacgctatgaacatcgtcactgcggcggtgttgaagcgtatcaacgtggacaagtcctatgtctatcagtcctatgatgtgcctaatggtgcatccgcggagtcccttgcctatgacctctacaaggaccctactctgtgttgggtgttcttccttgtcaatggtatggtgaatccgttgctcgattggcctatggatgattccgtactcgaggagttcgttgttgctaagtatggtagcctctactccgttgtctacttcacggacttggatggctatcgacttgacgatgtggctgaggcagctgtgcgtgcctatgtagatgctggtaaccctatgcctgcgaacgttcatcctgtgacagcattggaagccgaatcagagttgaaccgtaagcgtggaaagatcgtcattgtggctccgcgctatatcaaccaatttgtagacttgttcaataagagcattgaaggaaaagtatgaccactgctacgactagtgccaactatggtgacctcaagaagtttgtcgtcactattggcgatgttgatgtctctgctgctgtgatcagtgcacatgtctttcaggagatcttctctcctacgactactgccattgtgaacttcctggatacatcgaatctgttgatgactctccctatccgttctggtactcgtatcaaagtagagatcgagactgatatggcgtctattggtgatggtgagcagtcgtgggagttcgtcatctataagatcgccgataaggtggctagttcccagggtgtgttggagtactccgtctatgcagccgacgaggccttcctactcaatcagacaaagcgtatcaagagatcctatgcaggtaagaaggtctcggacattgccacatccgttgttcgagaagcctttggtaagaaggttgacgttgatgcttccgacaatacgatgcagatgatcgtgcctgggtggactccgttccatactatgtcgtggttgttgcagactgccacaaaggatggtgctgccgactatgccttctatcagcaggctaacggcgacttcgcgttcaagtcgttcgaaggactctattccgatcctgacgagtacgcgggtatcacattccaggtgcgcccagctaatctaaaggacaacaagggtgattcgctctacgactatgccactaccattggtgtctattggtttgaccacttcgacggactgagtaacatcgcatcgggttactattcctcaaagactgcgtcctatgacttcaagaccaaggcatgggaaacaaagacgttcaagtttggtgatgacaacgcgcaggacaagaagtacctgaaggtagactcggagtatctcatggatgccgaggatgcgaatatttcgttcattcctaagcatagtggcatgttcaagaatgcagcgtattcggatactgccgatgcctggattgcctcccgtaagtcctcactgatgaagttcgagcaagagaagttgatcatccagttcccaggaacggcgggtgcagctagatggttcgcgaagtccgttgatgtggacctgcctgctcaggactctatgtccgatgaagagttcgatactcaacgtcgtggtcgctatgtcatcactcacatggctcatatgatcaacaaagacacctacaagatcaacgctgagctggtcaagaagagactcgaggaagcataacagctgactgagcgcgcgtaccgctgctctgtttactcggtcaagacctacatacaccaatgcgatgacttgctcaggtaagccatcattctatcaataagagagttctatgtcgcaggtacacaatttttcgttcggtggcggtgccttcgaatggttcatcggagttgtcgaggatagaaatgatccagagaagctgggtcgtctccgtgttcgtgcattcggctactatgatgacgaagccattccgacttccgacctaccatgggctgtgcctatgcagcctatcacttcttccgcgaagggtggtgtaggttcttctcctacgggtattcaagaaggctcccatgtggttgggttctttgccgacggaaagaatgctcagactcctatcatcatgggtacactcgctggtgctccaggagggaagcctgatacgaacaatcttgctcgtggtgaagacctcggacagaccgtcattgccgagaaggtgaaagccgtcaagatgtccttggcgaatagcaatgcgcttagtggactgtctgctgccaccaacatggcgaacaagatcaactcgactgtcaaggatgctaagtctaagttgaatagtgttcgtgatcagttctcgaacattgcaggtctgtcgaatcttccgttcatgtctgggttgaacaatatctcatctaccatgacacagatcgccacactcccatctgaggctaaggcactgcaagcccaggttgaaggagaggtactcgcgatcaagggacaaatcgagaacctgaagaacctcgaccctgaggcactggcaagacagttggtacagaatcaggtaggtgatgtggaagccgcagtgagggcaatcaagtcactcgacttcgactctgtgatgggttctatccagagcattccaatggcgatcggacagatcggtcgtctccaggatgccatcaccaatgcaggaaacatcggaaagattgtaaccacgattcaagggctgtcgagatctattccgaatctcgcatccatccgagcactgggtacgacgatctcatcaatgaacggatggttggagcctactactatggctgcaccactctatccattgaacaagatcatggagaccgaaggaggtcacctacaggagttcgacgacacacctggtaaggaacgattccatcagtaccacccaacaggcacgttcaaggaagtacacccagatggatccaatgtcgataaggtggtcaaggataactaccgtgtcgtgatgggtgatgactacctacacgtagaaggaaaagttcaagtcaacatcgttggtgatgcgacagtcgtagtcaatggtgattgcacgacccaggtatctggtaacaagacagatatcgtgaacggaaattattcgttggctgccggaggcaatgtgtctatcgcatcaggtggagcaatgaccatcggtgcagctactcagatggctattcgtgcaatgatgatcaatctcaattgatcaaggcatgccttaaactctgggttgagctggttcttgacccaggcacctttctttctaacttttctttctgataaatcaaattatacagaacggtccaatacggtgtccacaggactaaggacttgtacctttgataaatatcgtgacctaacagagacccatacaatgtccgactttcagcaattcctacaagaagcatccctcaaagagtgtgacgagctcaatgaaagcctaatccgttccgcaggtgcgtctttatacggcaaggcaaagactactcctgatcacgtcgcatcccaggaaaagggacatgtgaacattcacacctataagaccatccgtcgatcgggtagtgataaggaaaagacctatcacgtcgtgagtcatggtccttaccgtaacagtggtacccataagatcggttctcagcatacccatggatctggcggacaggcatctaagttggtcggcgtctccgaatacaagaacggaaagaagacgaagactcacggtgaagaccactctgccaactcccactccattcacgtgttcaagtaagtcgtaaatagaatagagacaacccaaggaacttttcataatgccaagctcgacctctacaaattaccagttcaacaagttcatggaatacttcctgaagggaactgcgtacactccgcctacttcggtttggcttgccctgttcacgactgtgcctagccttgctggtacgggtggtgtcgaggtaagcacatcaggtaccgcatacggacgtaagcagattctgtccacaggtacttcatggaacggtccttcgggcaccaaccaggaatggtccaatgcagccgacgtcacctataacgtgccaacaggaaactggggtaccgtcacgggtgcaggactgtacgacgctgaaactggcggtaacctactctacatcgcaacactggcgactgccaagacggttaacaacggtgacggtgcgccacgcgtactcgcaggacagttgaagatcagtcgcgctacttgctgattgttggaaacacggaaaagcccaggttcatcgcctgggctttttcacggctagtgatcttaggtcgttgcgatcagcctgacaaactcttcgggactgaccatgttttccttgacaccatagtatgccgtatgccccacgacgccatccaggaaacagatctgggtgtaatgcgcccactgggtcgatttgttgcctttgacgagacggtggttgccgtcgtcatcgaactcgtggcgcatctgttcttcttcgagagcgatccaggttccttcatccagcggaccgacgactgcttcgacttccttcagccacagtccccaggctgcttcgtattcgccctgcatttcggcgttgtcccaactccgcgtttctgcgttgtagtacttggccttgatgtcgtgtgccttctcgtagttggcagacttgttccgcagggcggtgtattcgctgtggtgaatgctgttcatggtctttgtgctcacttgatgatgggttgggcttgcttcgactggtcgtattccggttcatccgggaacctgccgaagcggtcggggatcagcgcctggacaaagcctaccggcatgtcactatagaacataccgacagcggtagcgtattcttcgagcgccttcctggtgtccgcttccacaacacggatggcgtgttcggtgccatcacggaacaccaacagtccctcgttgtcgcccatgacgaacttctccttcttctgccagccgctgatcaggtcactgatcaacttctctgcaatcatgggatggatgttcccgaccatgatcacttcgggccagccacgttccgtcaaaccgacggtgtacacaaacccaggatccttgtcttctggatcaaacacaccgaccatggtgtaaccgttgatttcgattttgatggccagttcgatggcgagcatttcgttcatcagttcttctccagttgagagctgttcacttcgatcaacacgcgcgtctttcccagacgcaccgcatgcagtactccgtcctttgtgtagaacggcatgacgatgggaccctgaggacgcataccgccaccgatggtccacacccattccttgaagtccggtttcgccatccgctcctcaacccacttgcgttggaaggcggtgagattgtaggacttgatgttcttctcgaatcgttccttagtgatcatggctcagcactcctcgagcttgatcttggaacccataaactcttcccacgccgagacgtccttcttctttccgtagaacgcgagactgacatacagccgtccctgcatcccctgttccgtgtaggtgaccttgttggccagcttcttcggaagacccaggtcgatcagtccctgacggaactcgcgcaggaacttctcgtcggtgtagatgaagccgtcgttgcgaacctgccacgtctttgcatcgaaacgcgcgtcgatgtagagcgtcatgtcctcattcttgccgaatgcttcttcaccgtagagatatgcttgggcgatcttgatcgcattgatcaggacttccttctttgcggtggaccaatgaccgcgaccgctggtgtttgcgaacagttcaactttcacagacctatctccttttcctgtgcgtcacggatttcaatgaccattttcagacgaccttcaactgccttgacgaacgacttgaagaagcgaatgttcttcttgtcgcccgacttgatcgccgccgctaattcgcccttccgaagttccaactcggcttcgacttcgcgaacctgccgataccgagctgccagcgtaggacgaggaacgtctttgaagatgtcggtcatttctggttgccctactgtttgtccgtgccacaattatatagaactttcgtgtcctgggacaatcttatagatcagacacttacgtatctgtgtgaattttagccgtgaaagagcccggatttctccgggccccttgtattacttggtctctgccaggacttcggtacgtcccagatgcacagcccgcagcccgtcctcggtcatgtaggccaggaccagcttgccctcgacacgcttgggcttggagcgggtatggagccagtacttgaagtccgactcttcctgcttccgctccatccattcacgctggaagggagtcgggttgtagagcgccagcttgtcgctggagtcggacacggtctgggtttccatttcgtcacacatgatctactcctctgttatttcagcctccgattgaggcaatcaaactgtaacggagttctttctgcaggacaaccacttcgtgaaggttgcggagtccgctgatctgtgtttggaaattacgaccactccggtcccgtttcatcaactcctgagccacgggtcctctctaccaactccttgaccagcggcttgacggtgtagtaaaagagcataggtctctgtttcatctcagctgcattgaggcgcctttcctctgcgactgcttcttcctttgtctcgaatggtccctgcacggagacgatgttacaacccactcgatagtgttcaacgattacgtatgccattgtcttagtcccatagtccgctgtgtgactcatctttgaaccactgcttggcacgttcctgttccgactcggtcatgagtgggtatgctgcattaaccaacccatgtctcttgcagacaagattctgtcttgctcggatgctgctactccagtcccataggatgggtcgaagcagttggttgatgtattcctctctgtagctcatagcttctctgcccattcggtcattgcggttacgatcttatcaatgcggtggtcgtagaaacctgcgcagttgatagtgttgaattcgatcaccttcattccatcctctgtatcggcgacgtccataacacagcaaggatgaggcaaccacttgtctgcgagtgcctgagcgtgtttgtaggcttcgggatcgttcaagtgctcagacatgagccgtccgccgaaacggtacagtgaaccatcgatcacctttccgtcgacaatgaaccatctcgactcgcagtagatgtgctttactgcggctacgatgacctgtgtgtcttcaccaaactcaaacgaaccagaacgaggactctgcatccagtctcggatgtctgccgtatctgcgacagtaccgttgaaggctttgagatccttgaccggacgaatgaaccacttcttgtcgtcggcgcagtctcggaaatagcgattcagctctttgattgtcaggtgaatgcaatcgccattgagcatatcgtcacgttccgcattccatcggatagcgtcgaaacgttcgatgtcgtagcaattgcctttccatttccgctcgttggccatcttcgccaacttgactgagccgtagggaatgatcactgtgtcgtccgggatgttctcatactcggattcgttgccgaactctagagaaaacggaatgaccgatgcttcgacggtctgacaacccaatgcctttgctgcattccatacagcctcagccgtgtgatctgctactaggtttgtctgtactgcccatgtgactttgttcattctgtctctacccaaaagtcaggaaagaaaatccaaccatttgtcgtaacccaatgcccatactccgcatcccacgagcagaccttgaagcttttcttgcgtgtcgagacgtctatgtgaccatacatcgtgatcagtgttccgtctttcggcgcgcctttgacttcttttatatccataattcgctccttatgccacggcaatagccaggtttccctggctaccaccaacccctactacgaggtttttacttgctggtcagcttgtcgatgacctgcttgcctacgtccgactgtgccagaccttcgagcatgccggcgatcttcgtaccgcccttcggaccgaacatgtccaggacgttggtcacgccttcgttcgggttgcctgcattgctgatgaccttgatctcagcaccctgcagagccttcgcaccctcgacaccgatcttctcgctggcctcgacctgacggagatcaatcaggtacttctggtaaccctggttctcaccgatttccttagccagggtgatctgtgcctgcaccggcgccagctgcatcgccttctcagcttctgcctttgccgtaccctcagcctggataccttccgcgttcagcttctgagcagccaggttaccttctgcgaccagtgtcgtgcgctgcttctgtgcttctgcgttgatcacttcctgctggcgctcaccttctgcctgcacgatcgcgacgtccttgacctcgttcgccttgaccacggcgaccttacgctgaatctccgaagaacgagttgcctcgacttccttgacttccatctgacgaacagtcgtttcgcgctgagccgtcagcacttcctgctgcgaactttccttcgcgataccgaccgccttttccttctcagccgttcgctgaccgatagcctgttgggcttcctgatcacgcagctggaccgtctgggctgccgcaatttccgcagtctttgcctgctgggtgttctcagcaactgcgacacggctatcacgttcaattgccgaagtgcgcttggccatgatgttggcgatcacactcgaacccttggcatctcggatgtccatcagctcgatgttcttcaccggctcgacaccccagtttttcagctgctcgccgacttccttagtgaactggtcaccgaaggtagcacggtccaccatgatcgtgtcgatttcatgcgaggccagaatggttcgcaccgcaccctgcacaaccgaagtcagctgttccttcagttcatcgaagctcgacactcgctgtgccgcaacgttcgagtctgcgattcggaagaagctcgtcacgtcaacaacgaacggaacacgttccttgtcgtacgcctcgtatgcgctcaggctcaggtcgaagaccgacacaggcaggatgattcgcgtcagacccagcagaggaatccaggaaggccagttgtagtaagtgttgccaccgtcctggtccttaccgtacgaggtctgcgacttcgaacgctggagcgtgtgtacttcattcgccggaacgacgacacgcaggttcagcacccagaagatagctgcaactgccacgagtgccgcaatgcctgcaccaatgagaataaacatcagatcagatttccttctttatcaatgaattggttggttacgttttcaataacgccaggtacgtaaaagacctgtacatcgtcgcacactcggaagtagttcttgaagtcccaatacccttcgtccgggctagcgagcaattcctgcataagagagctgaagaagtctacaaactgttctgccgcttccaggttcgcgtacttctcatctcccttacgtggatcattataacggagtgccaactgttcgtcatacagctcgatctgctctactgtcggcagcgcgtcctcggtaccccaaagtttcgcagcgacctccggatacttttcagcagcatacagccacaggttgaacagttcaaccgtttcgttttcgtcgttgccggttaccttgtacggcaggtcggtatcgcgcttcttgtagcgagactcgaacgccttcgcgagcagcacatagaactgtgcttcatctttcgtcaggccagaaagaatttccgtcttgtagttgtcggcgtcgttttcccacgacagtacgtgtacctgatagccgggcttgatgttcttgctcatttcagtccttgatagtaggtcttgagttcttcgaggaactgctgtttcctcaacagagcctcagctgtgttggcgatcatgcttccgacgaattccttcggaggaatcacgtcgagttcgatatcgtagctgtactcacagtgaatcgcccaggtctccctactgtggagaatttcgtaccaggcgtcttctttgtctccattgaagtcaccttcgaaatacttccactgaccccagccgtgtccgcctctaccactgatccagtatcggttgaacttcatggcgcagccttctcgtagaagcgaagagtgttgtactcatcgtcgctgatacgaacgaccttcgatgccttggcttcctcttcggcgaggttcatgatgcgacgaagctcagcacgatcatcatcgtaccgcgagaggtgcatacgccaagtaccgaaaccccagccatcagggtcagtccatgtctttcgctcttcgatccactcatcaaacggcaggatcgtttcgacttcccagacacccagcttggtcagccaacgattgttgcgtcgcttgttctcatcgacgtgccactgataacggtcacctttgtaggtgtcaacccatgcttcatgagcacgagcattgacaccttcacgagcccgctttgcgatatcgaagatgaagtcagcatcgaattcacgagtagccattagtagcctcgctcgttgtatcgcttagtacgctcttccttggtcagcacacggacaaagtccacacgctcggaatagtacccgtttgaggaaccgcgccaggtgatgtgaacgaattcgcgctcagtgcggatgcggtagaaggtccaggtgacagaatcgtactgacgagtttcatcactgttggattccacagtcgcagaacggatcggagaaccaaccagcgcgtgaacgtcaccatcaatggcgtcgatgtagacattctcgcagcagttctgctgatggaacatcacgaagtgctttccacaggtggtgtggaagtcgatctggtcgttggtcttctctacgcgctcgagagtcagaccaatcaagtcgtcgagcggaacatgctcaaatgaatcgtatcgcattgtatttccttaccaatcgtagttgaggcccttggtcgggttcttaagaatgctctcacgccattcgtggaagctctcttcagtgtactcttccttgcaaccgaaaatggactcatagagatcgatccactcgacagcttgataacgctcgtagccgaggtcatgcaagcgctcttcacgggcgccatcttcgatctttacgagcatgtgcagttcgccacagccgtagtcttcgaattcgaagatgatgtcttccttgcagaggcgcttgtaggcagcccatcggtctttgaaaggaatagccttgttgctcagttctttgatgacagactttgcagcgtcatcagcaacttgccgaagagaaatcacggcgtcaattgcttctttgttaagagcggtcattacgtgtcctgaaggctttggcagcttgctcgagagcagccgtacggaagagggtctgtgcgatgttgagtgactcaatgccaggaatcaggttgagcatggacgcacactcgcgaaccacgcccttcgatttcaggatgccggtttcagacatcctggtcagctcatgagcaccctcagccagatttgcttcggcaaatttctttgccgattccatgatccggataatctcgctcactggcagacgatcgtgttgccgttggagtccttcatcagcactgcgccttcgggagacacgacatacttctgaccgtcgatacagcgagcctcatacgagacctcagctgccgggcgagagatgttcgacccaccactagcccaggtcttgaatgccggaatggcaatcgcagccaggatagcaatgatcgcaacaacgatcatcatttcaatcagcgtgaagccttttgcgttcgaattcttcatagcgttcaatgtaagcctcataatgttgaccgtgttgggtcttgaatttggaatcgagatggtctgcttgcttaaagtgacgattggctttcgcctcgtcgtcacgatcattccaagcgttcatcagactggcgaacacagcacttctcactgcctgcgccaactgatatgttgcgaagttcattttgctacctggatgcagtacgccttactttggattgtatagtaatagcccgcttctaactttcgtacttcctgcgaaagatagttcgcctgttggaggcaaagttctttcgtctctaccggaatggtggtctgcgaaaccgaaggtacacagcctgtacctccgcacgttggtttgctgatcatcaccagaacgagcgcccattttgccaggatcattcgccgtactccaggcgaatctgacgcgccagcttggtcaggaattcgtgctcaccgccgtagtcctggaaagaaagacgacggtcttcaccgttgtgaatgcggaaagaactgccgtgacccttggtctggacttcggcaccggtcagtgtgaacggaatgtagtagcggtcgtacgccttgtcgtactctaccttgggcagcggtggaaagatctcgtcgagaatagctttcgcttcttcagaaaaatcgcactggtctttgccttgggcttcgagcagagcgtcggcgaggtactcaatcttttcttggcgtgttctgttcatgttcacaatgctacagttcgcctacgaaagaacaaccgtggtaaatattcgtgtacctccaaggactttgtaatggcaggctttaaacagacaattatttcgcacgcgccgaagatgtttcttacattcgacggtgatgcctacgatccgaacagccgactgctcacggctagccctcaggtcttcattgacgagtcgggcttcaactccaacatcatgctgcacaatgagtcagaagtctacccagcctatcgcatgggtatcccttctctgattgacattgagcagacagatcaacgtagcacatcattcggttggtatggctatcagccgcttgcgcctacccgttggccaaagtctttcgtagaagtgcagcaccagtctcatcttgctctcaccgcagagcgaggttcctacactgttggcttctttgtcaacaaggcagagaaggaagacaagtggcgcgaccaagaacgcatcctagggttcaaccactacacacagacactcaacaagcgcttcatccgcaaggctgggtcgtttgacgtctacttccgtgactattgggcagctgccgaagagattcgtttcggttaccccggtggcggtgagattgtctgggttgtgcctgattggttctacggcaagaagaacttcgttgtctgtacttggaagatcacggagatcaatcctgacgtctacctcaacgaggcctatctgtacgtcaacggccatctgtatggcagctattcgacaactacggctggcactttcccgaacagcacaacaaccactccaatcgagatcgctggcgtaatcaactcttcatcatactttgaagaccgtcagacgagcgacctgcaactcgatcagatgttcatcctcaacaaagcgttgacccaggacgaaatctgtcgcttgtatagaaagtctaagtcgtacgacaacatcgcagttcaggctcaggcatcagcatactggccaatgacagatgtggaagacccagcagtcttcacgattaaggatttggtaggctacaatgacggtgtgtatcttggtggtgtggcacgcgtagcacgacagcagactgctccgagtcctatcctaggtggctcatctgtctacttccacaatggtggtatgggtgcagcccacagactgacgaacgttacaacctatacgccagtgttcaacttcaatggtgactggactgtagacctttggatgcagttctcaaacacggatcgttcggtactcttctcctgtcagaaggacgactatccgcatggtggtgtgctgattgaagttaatcgccgtaacaacaccaacgtgccaggacacatccaactctcagtgagtcaggagttctacgtttcgtctcttctcaatcgagacaatggtcagcctttcaacttcaatgatggtaggttccaccacgttgcagcagtccgaaagggaagcactgttactctctggattgatggaatcaagcacggttcggttagtgcgcctgttcagagtctttccaacccaggccccggtcaggtgtacttcatgggtgccgctccaggcagtctaaataccactggctacatgtctgcggttggtgtctatccttacgctctggatgatgctgagattagactgcgcaatctttactcgttgatctatcgtatccaaggcaatgtcacactgcaaggtaacccttatcgtgctactgtgcgtgctttcagtcatagaacaggtgcgttgattcgagagattgagtcttcgacatcttcaggtgactactcgatgacattgtatgacaactctttgattgacctgatggtcatgaacaagcaagaccctaatattcgctatcgagtctatggaccgattgcaccagctctttatgaggatgttccataatggcagttacccagtatctctacaccgacaccgacgctccagttctctacgggcagcctggggctttcatcacagtgctgaaagctgttcttgtgaacggttatggcaccaagcccggtatgggttggacgctagagtacgagtcaggaacgatcgcggtattccgtaactcgaccgctgcgggctcgacaggcatgtacctgcgagtagatgactctaactggcagtatgcgattgtcaaggcctacaagacaatgtcggacatttcgactggaactgatgctattcctggcacccttccatcatacagcaacacgaatatcttctggcctaagtcagcaaacaataacaacaacgctatcatgtggaacttcatcggtgacgagagaacgttctatttgaatatttgtccttggtcaagccagaacgctaatcagtttgcgaactatgcgtatatctacgctgcgggtgattacgattcctacgttcctagctttgctcataactatttcgtagcaggaaattatgacggtggctattcatcgaatggtccttgtatgatcgacgatcagagttcctacgtatgctgtgctattggacgtgcgcaggacaatgtcgctgacaaatactccaaggcatgggtaagctacatggcaggtggtgtaccttccggatcatacaatcatcaagcgttctcagtctacacaggacagagaatcttctatcctgcatatgtgatggaaaatgctgtccagaccaatatcacaggtaagtggcgtggtttgtacggaatggtaggtcgctcaaacttcacatggaatgagaactacggcaagctcccaaacaacccaaccggtcctgatttgattcagttcacagtttccaataacagcagtcagggcgtctatatcttgaacggaggctggtaatgacaattttgattgagcctgcagtattcaagaaggaaggaacatacacttggagcgataggcgcaatcactaccttgtcatggatggcgagttcaaaaagagaccaaatgatatcggcgggctcggatacatcgcgggtatgctacctggaatcgtgacagtagacggcgcacccgcatctagaacaattgaacttcgattccgagatggtcgtaaggaaatctttgcaagcacggtttctaaccctgtaaacgggacctacctcattgacgacctcaacccaaagctcattgttgatctcattgcaagagagaaggaagacggagtctataacgatatcatcttgtccaagattcgcccatggacagactatcaaatgtacatccatggacctgatttccctaacgttcgaatcaagccaattttcaagcgtgtgtttgagctcaccggcggagtgatgccttatcaactcagctcagatatcactattcctgaaggaacagaagtaacgcttgatggaaggttcttgacggtcgatgttactgcacctatggaaacagatctgtatatcaaggttcaggacacttcagggctttcggttgaaaagaacatcactgtcagttcctctaattcgattgtatctaagttcaccggaaattggatcctcgaaaacgaccctgtaacggacgaaccaagactgaggtcaaatcagattccgcattctggttctacatcttcgacttgggcagccgacaagaattacacacagatgtcgttccgtatgttctcatcttccgaaacaggatacgatattttctacctatatgtcaacgattcggaacgtgctcgtgttagcggtccaaatagttcctacaactacagcacgcctatcaatgctggcgatgtgattagagtcacctatgcaaaggatggtagtgcaatcagtggtaccgatgaagcatgggtgtatatcgacggcgtctaaataagacgaactcaagagaaacaacaaatggcaaactcactatacgctaaagcacgtcaacgattcctcgaaggcgcaatcaattggaacacagacacgattcgtgctcttctcgttgactcaggtaactacactgtcaacctggctacgcacgagtttgtcacctcgattccttcaggtgcacgagttgcagggccaatcaccctgacagctaagactacgactgatggtgcagccgacgcggctgacgctgtcttccctacggtctctggtgcaagtatcgaggcagtcgttctctacaaagacacaggtaccgaagcgacttcgcctttgatcgcttacattgacattgcatccggtcttccagtaacgccaaacagcggcgatatcaacgttgtttgggacaatggtacaaacaagatcttccgcctatgaatcatctcttcgcataccaaccatacggaccataccctttccgcggtaaggtaatgatgttgcgtcagaaccttgagcctgtgattgacccaacaatcacagtgaattggaacggatatactcaggattaccgctgtcagatgaagattgcgcctgaccagaccaagggttcttatttccattctgcaagtggttcggctgtccatagatatttcacagtcactccctcaggtctaactctggtaaatgcaacagctgcatttgcaggcgatgttaatgactcttttgtcagcaatgattactatggttgggtagggacatcttcatcgtatatcaatgccttccgttggtcagaccacagccttatcacattgacaaagactggtctaggtacggtgtatggatgcacaatcaatccggtgaatggataccagcttgttgtcacacatagtgccacacctttcattcgttcttatgatctaagagacggttcgtatgtggatggaggggtggtgggtgctaactatcaatcttgtacctggacacctgacggtcagacggttgttgttctttcagcgtcgtctccatacgtctccaagtatagcgcgaacctagcaacaagaacaagtatttccacaaactcatcgtatggtaactcaacaagctatatgtcaggttatagctcttcatacggtcagttccgaggaattccgcattggtctaaatcaggttccgtcatcatggctccgggctccacgtccacaccattcctgtttgaggttgacactgttacaaacacagtgattccgattgctacaaatgatagcgcatatttgtatggtgctgcgtacgatcctaagaacaataaaatctacacctaccaaagccctaacggtctaacgaatagcccattcaggcgttacaacggaacaacgtatgccgaagagcctatgtcctcagcgtcatatatgatgaccggcggaaactcctcaggttgttcaactgctctgatggtagtgagttctaacactggtacgatcacaggaacagttcgagacgtcaacaacaatccggctgctcgtaagatccgagcatatcgtcgttctgacggactgcttgttgctgagacaacctcagacggaacgaccggtaactacacgatcatcactccaacctcagacactgaggcatacgacgttcagttcgttaccaacaatggcgagctattgaacgatttgttctacgcacgcaccacacctgcagcggtagcataatgccaagaaactttgtaactgtgaacggcactgtcaacattgatggtgctgctcgtcaaaaggatatcacactgttctcttacgggaacggtgccaatcctacctacatgactaaaggcacaagcagcccagtagacggaacgtactctatcatcggactcaaggagcgcggacagcatatccttggcttagcatcatctgattatggtcctacatggctacctggaacagcttatacggttggtcaaacggtactccctaagaccgctaacaaccactggtatacttgcacaaccgcaggtacctctgatacgattgagcctaactgggttgttggtggagacttcacgattgagtgctggttgaacagagcttcagacaacaacatgtctgtcatctcaaagctaggccctaactacgatggatttgcttgcatcacacgtggtggtgcagtcggttttatggtcaatgggtttgagtacaactctgctcctaatgcaactgcaagcagcacgtggtatcatgttgcctgggttatgaccggaggcacaatgcgaatctatgtggatggtgccattgttgtagagcgtgctgggctgtcgattcttcctaatacctatgatgtggtcattggtgcagacaacggaacaggtgttcgcgctaacttcttcaatggattcattgatagtgtccgaatcactaagggtgttgctaggtactctggtaattcattcaatgtaccaacaaaggacttcccttccttcggaccagttgatcctctgtctcctgagactaagagcctgatgcggtttgacggtgttgaaggttcaaccacctttgaagatgagaaaggctttacctggtcagctcaatccactgttgctctacagacaaaccaatacaagtttggtgggtcgtcggcatacttcaatagctcatatgcgccatggatgaaggttgattacaatgctgattttaacctcaatggtgactggacgattgagacattcttccgtcttgatggaaacacttccaatgtcacacctcacatctttgaggtaagcaatggccctggccaacgtttgaacgtctatcgagacaaccaaggcaacctgtcgttctatacagagtacaccaatggtgcttctggcgtccgtttgacctatccaatttctcctgacacatggtaccatgttgcacttgttagaagttcttcaggtgttaagatgttcgtcaacggcaacttggttggtacctacacaggtgccgttattcctgctgcctcaactgcacagatctacctcggaaactactcgttctctccaaacaccaacgacggtttgaatggttggatcgatgaattccgtttcactcgtgcagtcagatacacatcttcgttcactgttccgaccactgcatacccccgagcaggtggcgacccgtcctataacaacgtatcgtctctgatcaaattcaacgattcaatcgttgatgaaaagggtccggtttggacattcacaggtgacggcggcccgagacaatgggcgtacaagttcccacctgggtctctctaccttgttggtagtggttcgatgtctacaccaaattcagatagcctcaatctagtttccaagactagtttccctgatggcactgcaaagtggattgacagcggcgcaacggagtcacctattgcaagaggaccgttccagattcctgatcctgttgcagacacgagcacaatcttcctatctcgcaatcacgaactgcctccacaggaagagatgacagcagcaaaagctgtggtatatggtgggtgcacctcggttagcagcaagtttgccggatacaacgcgatcaagtttgatggagccacagcaggtctctattatcctgctgtggctcctggttcaggtgattggactgtcgaaggatggttctttatggatgccttgtctccatcatcttcgcaatgtgttctttacatcggagatattggtagcaacaaccatcgccttcagatggggcctactgctgcgaatggaatcgaaggttacgtaagtgcaggtctcaatggtggtacatcttcattcgccgcatcgaatcctgtatcaggtggatctcttattcaatcaaacacttggtatcacattgcttttgaaaagtttggaaacaatacatacctgtatctgaatggaacacaggttgccacagctacccttgtagccaactattggatggttcctgcttcaaatgccaacacctatatcggtaccggtcgagttgcaagtgtaacaagattcatcaatggcagaatcggcgaagttagagtgagcaacattgcgcgctaccaaggcgtcgcaagcttccaaattccaacggcgccttacacggtttgaaacacggttaaatatctcagtctatagggctgatatcttatctgtgttgaacgcgctatctgaaaatctaaacgacgccgcaggtagcttcgatgccacttgatttcattgcgtctaatctaacccataccaaaccagtaggaactctggactttgtaagcccggaaggaatgctatttggtattgagattggtgatggtggcgagttcaagattgccggcgcacttacaggacaattcctccaagcttcttggggcggtaagcctgtctatggtcatcccgctcatgttgttgaaacaacctggggcgacaagacatacatcggtgcaggtattgcacgtcgtagccatgtcaatgttcctaccattgtccagcaacagatcatcaagcctgccggttttgatcagtcagaattcggtgtagttcagaccaacccaacttccaagtatgttcgccctacaggtggacagatcgatacaacttggttcggtgcaagaggatactctgctcctgtaactgctgttggtgcgtcttggtctgaccagattgtaatttctcctcttgcgattgagtcgacgctcaccttcggtgatgcaaagatcgtccctgaacagaacattgaaccttccggttgggcgtcaactcaattcggtaacagctatgtcttgcattggtacgagtacgctccgccaatgtggactcttgatggttcatgggctggtaaggacgaatactttgacgctaaggatggtgtaatccatgccttgtggcgcccacctgcagattcacagacaatcgctcctattgcattcgttgatagtgcaatgggtagtccgcgtgtacgtcaagctgtaaagcctgagggtattgcgtctactgtcaacttcggtatcgctcagctattcccttcgatctgtaataactggtcgtatcagggcgcaaccaaccgcattccgatcacttttgccaatgttgctgaggcatacccaggcaaccgcatcccgattgagttccgttgcggatcgtcaggaattcgctactccgacttcgaaggctttatcgaagcgcgtgatggtgctgaactccaggtcaagatgtatgacggctatctgtcgctcaacatcggtgaaggtgctactctaagtccaattgatctgacgacacgagtcagcatcccgctcaacttctatgatggtgcgagctggattggtggacgtggttgccttgacgtatctggtcttgtcaacgttggttcgagcggtaacgctacaccaagcccaacactcaactctgttcgcctccagaacagtggtgatccgaccattggttcttcggttggtactcctctccttgacgtatcaggtcaagacacattcgagtactcatggacacagaccctcaacggtccatggtacgacaacgactttacagatgcgttccttgagttcggtgtattcttcaaccgtcctcatagcaccatcacaacggcaaccggttactgggaatacggcactccgttcaactccaataattcaccttggctgagcttcagaatccctcgcgatcctgaaagtaaaacagtcccggtctatgcgcgcgttggcaatgagacaatcaccctccagccatttgagaagccagctggcctcgatctctttgctggtggtaaccgtcttcgtgttcgtttcctacgcaacggtctaacgcttactcttgagatctactacggcgatactctgctctcgaggcagaacccgcctgtatcctggccaacaagcgttgtccctgtttggtactaccgtaactacaacaccccatcctcgtacattgaccttgcaaacatgctgggctgtacggatggtctgctgacaacttacccagctaccaacttcaacttcggtgcaaacttctacgatgggcaatcggttgcgcttgatctgtccacgtcgacgatcctgccaatcaatagcttcgccgaagatgcttatctggctgcggtacttgatacacgtcctgtcgtaacattcccgatcaacgtctatgaaggcgcctcagtcgacctagcactcaacaccacgtctacgctacagcctgtagcatacgatggtggtgtgttcgactttgatatcaagatcaacccatctgcagacctcctgtttgcaatggcagatggtgcttcagcttcgattggtctgtcaactgcattgcagcttggcgcagtcagcatgttcgaaggcgcggcagtttcagcgtcgcttgatacactcgaaaactactatatctacgatggcgcgttcgtcgaagtcggattctcgactgaaaccacgatgccaatggatggttacgctggcgagtcggtacaggctacacttgatgttcgtccatcacaaggtatcggcactctcggtatctatgaaggtgcgaacgttgtcacgtcgttcactacgctgcctcaggtactgctgtatccaaatgagatcaaggatggacactcgttcaactatgacatcctcggctttatggggattgacctcaacaatactgcttgctgcccaatcaaggacaatccagcacgtattgaactgactgctggacctgcaccagatgagcgttacgacggcgacaagactgtcttcactgctgaactgtccacactaccacgtttcagcctgaatgtctacagcggtgagcgttttgactctgttgatcctgagtacctgacgttcaacttctatgaaggctcaggtgcaatcgttgatcgtgtcgagtacagccgttacaacttcaacctgtgtgagggtaacttccttccagatggcgatcacgtcaacgttgagcttgtcgctaccgattcgctctgcaatgattcgactctcatcttcgatggcggttttgttgatctcgacattcagaacaatgtgcagtttgctgtacctctgcctacaggtgaatacctcgatgcagtggtcacaatcgacaacgcctggatcatcaacttcctgcacggcgaatatgtacgtgtatcgaatcccgaattcccgctcaacttctacggcggcgaaatgtcatccgctaagtttgaagaggaagacatctacggcttctccggcgagtatgtttcggtcaacctgtccactgactacgacgttgagttccttgaagtaggctgccttgacaacgagtttgttcctgcaaacgagaacggcgaccctgattgggacaagttcaatcctgttccagttgagctcgacttcttcagccactcaatcaaggctcgatgcttctaagatttctttagtaagtaaccagtaatcaaagaaaactttacaaatggctacatgtcttgaatcaattgctgcgatgggagggattggatctctgcaggagatcttccctaacactgtcatgcctttcagcgtgacatcgacggctaacaagctgtttaggctccgatcgcctcagttccagtctgttcaatttgcattcaaccttgcaggtaactcctggaacacacagatgacagtgttcagttggaacggtacaacggcgaccgcaattggttcggcgtctatcacatcagcttttgtcagcgttaccattgacttccctgtaggtgattacatcatctgccttcgaccaggaactgcaacacctcagtcgggaaccttcactgcttcattcacaggctactcacagacagcaaatctcgtggtagatatgtttggtggcgaagagtactcatgcatcgtttctgatcctccaagaccgccacgcgagtgtaatgaggctttgttctttgaggttctcgaaggagaactcccacctggcttgcagatggattttcagggaacaatcactggtcttttgccaaacctcgattgccttgaggacacacctgcccctgctgtgaactggtactttaccgacaacgacggtacgtcatggccttggggtcgtcagtggagattcaaagtcaaggtatgggtcaatggtctgaaagacacagccttcgatgaagattggttctgtgtcaagatccacaacaactggacattcgaccttgacaacttcatggaacagagtccattccaaagagtggattatgtccgtgtcgtagagccaccgaagccactcgaggttgagtgcgcaccttgtgctcagatggaggaagtacagttcatccctcagccaattgacgctgtctgtgagccttgccaaaactctacggttgccaatcaggttgagttgattgcgatcccggttgagcttgcaggtatcgatccgaacgatgtcgtcacctggtatgacttgaacaaggacactgtcttcaccaacccataccttgagaagttccgtgatgatttgagagactcacaagttttcaagatcatcacaaactatcgagagaccaatccttacgagagcctcgagtacgctgtagcatccaactatcaaaactatctccagcttgctgagattcgtcttgatcctacaacggatccaaacaacctatctgttttgatggctcaatggcgtgactacatgaatcaatcgctgccaaccacaccaattggatacggaggagagactttcagtgtcaaccttgcctgatcaatgcgaaccgtgtcctgtaatcgagccgtttgtgcctgttgccaaactgccggacgtgctttgcccttgccctgaagaagtcgaaaagccttctattcttccaaccatcacgacacaggaagtgatcacctattgcttgaaggacgcacttcacgcaatggcaacacaattattctgtgatcttaacaacggtccaaagggctgtaggtaaatattcaagatatgggactaccaacttgccgaatgacagatatgactatgggtcacggatgctatccgccccagaaggtcttacaaggttcacctacggttttcatcgaaggtttgccggctcacagagttggtgacgcgatccagccacattgctgtgatcactgtcatcctagctttgcggcaatgggttcctccacagtctttgtcaatggacaaccactcatgcgaatcggtgattctgcaaactgtggttccaaattgatgacaggcgcaatgacagtattggcaggctaatggctgagaacaaaatcttttccgacctagacttgagcatgatcccgaatcctcatacgggtgacctcatgcctaaggtgaatcaagaagctatcaaacgctctgtaaggcatgccttcaagttgaacgcgtatgatatcccattcaacaactcaatcaagtctagcctgaagcactatctgttcgagcagaacacccagctcacacgcgctgcgcttgagactgatctccgatggctaatgaccaaagtcgagccgcgcatcgaagttcagacgattgatatcgttgcgcctaagaacaaagatggctttgacattaccatcacctacaagatcaagtcgatcaataccatcgactcgtttaacctgattgtcgagaaaatccgatgaaaaacttgcctgtccagtcgcttcaatttgaagacatcaagactaacttcaaggaattcttgaagggaaacgatcgatactctgacttcaactttgaagcctcaggtatcagcacgctgctcaacgttgcgtcttaccaaactcactacattggcttcttcgtcaagatgctccttgatgaagcgttcattgactcggctcacactcgccaggcaatgcttagccatgctaagaagtcctcatacgttccaaagggtaagcaatctgcgaaggctgaggttgttctcacgctaaccgttggaacaaacaatgagcctctgagccgtaactatccgattgaacgtggcgctactttcaaggccacaaacgatacacaggaccagcgcatcttcacggtgcttgatggttctactatctacaatcgctcggttaccggttcgactgctacctatacctcgacgcctctccgaatctatgaaggccaattccgctcctggaacttcgtagttgatacgagcgttcagaaccagcgtttcatcctaaaggacgagatggctgacgtcgatactttccgtgtgcgcgtgaaggagaatgcatcgtcgacagtgtttgaagagtacaccattgcatctgacgtgcttgatcttgatccgacgtccaaggtgttctttgtctctacggacgagaacggttactatcagatcttcttcggtaacggcgtctttggtgttcagcctgaaaacggcaacgcagttgaactgagctacatcagcacaaatggcgagacaggtaacggtgctaaggcattcacctaccagaacgatattcagaatgttgtctcgacggtaacgaccaattcggtttcggctggtggtatggaaccacagacgattgaggaacttcgattcgctattccgaacgccaacaagcgtcagaaccgaatcgtcatctcgtctgactatcgtagcatcctccttgacaagttccgcaacgtcgattcgctcaacgtttggggaggtgaagagaatgtgatccgcgactacggtaaagtctatatgtccatcaagcctaaaaactcggacaagctgacttctcttagccgcacgcaaattcgtcaggatatcgtcaagaagtatggcgtggtcggtatggacgttgtgttcgttgatcccgatttcatcaacgttgacctgtcaatcactgctaagcttgatctccgtaagacgactcgctcgcagcctgaactattcaaccttatccttgaacgtgtcaaggagtacaacgagacctacctgtccaagtttgatagcatcctttccgacgtcgatctcctgtcttacatccgacagggtgagcctgccattgtttcgatttactcttcaaagattctgtctaaggatcatcagcaccttcacaactccactgcctcgaacaatgtagtgtttggtaaccgactggtcaagggaacaatcgaatcaggtgtgatcacctatggcactgagactgtcaagttgattgatgacggtgcaggtgttcttaagttggttcgagtctctgatagttcagtgattgtagctaaatcaggatcggttgactacaccggaggagtcgtaacctatgcactgcctcaggctgctaaggttgctggctatgagacaagtacatcaggtgttcttgagttccgtgcagtcccttcggttccagacatcaacaccaacatgaacaacatcgttcgtatcgaaaccactaaggtagccgctggatgagcacactaatcccagtactcgcgcataagcttccagagtttgtgcgtgaagactatcctaatttcgtacaatatgtgcgagactatctggcctggatggaacaggacgacaacttcttgggcatcattaatgcctggaaggaaaacatggagccttcgcttcaagtcgagccttacattgatgcaatgctcactgacctcgggttcgtctcaggtcagaacctcgctgtagacaagaacctgttgatccatctgttgcaggacttctatctcagccgtggtactgaggcatcgttccgatttcttttccgaatgctgttcaatgccgacgttgagattcgctaccctcgagagcagatgctcgttccgtcattcgctgagtatggtgagcgtcatttcatcttcacctcagcgaacaacatcaacatgcttgacttccaagacctcgtactctatgtgcgtgagaatggtggtacgttgacaggactgacgactaaggtaaaggcttcgattgagaacattcagatcgtccatggctcaggaacaccgtatttccgaattgagatcctccgcccgacatttgaatttcttgtcggtgaagctgtcacaatcatctcgggcgactacgctatcacggagtttgtgaagcctgttctcgcaattgaaatgaacactcctgggtctggctacaaagcaggtgaagtgattcagatcactggcgccaaactcaatggtaacgcattcatcgagagtactcgcaagggcggtgtcagtaatatccagatcgtatcatcaggtgccaactactctgtaggcgatctaattgttgctcgttctgatgatgacggtttcggtttctctgcttcggtcacacaagtcgatgctcaaggtggcatcacagggtataaggtaatcaatgaaggctacaactacgcaacacttcctaatctttatgctcagagtactgtcccagcgagccttaaggcgtcaggtggtaacgtgggtgcgatccaaactgtcaaaatggaaaacccatttgtagactttgacgccaccgatatctctatcgtaagcgctgaaggaactggtggtacattgacagctaaggctgtcagccgttgggagactcgcgaatggactgaccgaaaaggcttccttgcagagagctcaaccctgattgactctgaccgtgtgcagcagttctcatacacaatcgttagcccaatctcatcaagcctttacgacagctttgttgcagactatctgcatccagtcggatttgttcgttcaagttcctacgagattgtttctaaccttggcttaaatatcacaagtggaacgcctgcaattggtactgagactccaatcgtgtatccggcagttctaaatctcacgtttgtgtctgagtacgattcgttcgagaccatcacactcgtaacagacaccggtgacgagttcggcaccaacctatttgaaccaatcctaattgattgaggatctaagaaatggcttacagcttcacgccttctatcaaaccatatgtgatctccagcttgtacgaggccatgaagtctgctcgcccttcggctagaactccttcgacttcctactcgcttggtgcacaggtttccaacggaaataaccgctacatctgcatgcaggaaggtgtcacaggtgcaggtaacggtccttccaacaccactggtgcggtctatgacggcacggttcgttggctcgcccttggtgcagacaatgtccaggatggtgacgtcatctctaacctctaccttggcgtaggcaagcagacagaatgggctaacccttctacacctgacgcaccagacacatctttgactggacagaatgaggcacttgatgacctcactgctcttatcaagattgactcttccaacctgcgacttggtctgaagaacaacacctggaccactggcacaatctactcgcagtatgatccggatgtggttacctatgctactccgaattatgctatcgttggcggcacctatgtctacaagtgcctcgataacaacaatggtatcgcatctactgacgcaccatctggcacaagcacttctctgatcgagactgcggatggctatatttggaagtatgtcggttcggtatcaggccctgagatgttcacttttggtacgaccgaattcgttcctgctcctaccgaagtcaatgttacaacagtgcagggtgagatctcgtcgttcactgatatggtatccacttcaactccgtttgctgctgctgatacgattcgcgtcgtagtacagggtaacggtacaggtgcatcaggtgctgcacgttcaacaacttcgggtgcatcaaagtctttgactggtctgtatgcaaccgcaggtggttctaactacaccgaagcctatgcgatcgcatataaggatggtactccaggaacaggcgcaactctggctgcgacaattgatgcaggcaagattgatactctgaccgttagctccccaggttcggcttacacttctgcatcagtggttatcatcggcgacggcactggcgctgaagcaactgtcgttgtttcctcaggcattatcacagcagtcaacatcactgaggaaggtagcggttacacctgggcaaaggcattcatcatcccaggtacggctggtggtgttgctaaggcaaacctgtctcctccgggcggtcatggttctaatctcgacactgagctgggcatcgcgtctgttctggtttcggcacgtctttcggcgagcctgtctggatacattccaaccgagcctaccgatactgacggttcgttccgtcaggtgactctggtttcaggtgtccgtggtacgactaagaacgcactcgcctacatcggtccatcgcatccggattttgtttctggatcacaggctaaatatctcaagggcagcgggtttgttctttacatgaacaacatcgtagctatcgaacacacttcctcgcaggaagaagtgatcaagatctcaatttcgctttaaggtaaccaatggctaagcttgacctaaatcgtgctccgtatttcgacgacttcgagccgaagaaaaactttatgaaggtcctgtatcagcctgggcgtcctgttcaggctcgagaactgaatcaggtacagagcatcttccaacaccagattgaatccttcgcgaaccatatcttcaagaatggttccaaggtaagcaatgcgcgtacctccttgcagtcgaaggcttatgtccgactgaccggaacgcctgttgtttctacctatcctgagaatactcgcctgcttggtgagacctcaggcatcaccgctactctcgttcgcggtgttgacgttgaaggcgacgatccggcaactctctatgttgtctatacaggcacagcaattgacggtgagacctcggtattcatcccaggtgagaacatccgtatccttgacgtgaacagcgttgaggtcggaactgttactgtccgctgcccatcatgcccaggttccggtctgagcgacactctacctccaacaggctggggtcagttcttcaccgttgacgaaggcatcttctatttcgagggaatgttcctcgatacgactcgccaagacatcatcgtggtcaagtatctcgagaagaatgtgagtggcgagatcgtcaacttctctccatgcaagatcggtctcgactttgttcagagcgtgatcacctatcaggacgacagttctcttctggatccgtcgctgggttatccaaatagcactgctccgggcgctgatcgttaccaggctaagctcgtactgaccaagcgcagctacaactttgaggatggtgaaaacttcatcccactgtgccgccttggtccaggcatggtcattgagttcatgaagactgactctgagtatgctgacctgatggataccatcgcgaagcgtacctatgagactaatggtgactacaccatccgtccgttcaaggtctcgttcttcaatgctaagaagacctcggctgctgatcctctgggttggtctgtcgatggcgatgaagactcgctggtctcggttgttactccttcggttgcatacgtaaagggttaccgtgtcgagtctatctccgacacccctgtcgtattcaataaggcacgagacaccaacaagctgtcttcctttgtcaagcacttcgatggtcgcagctacatcctcggcgtgcctaagggtgcaggtatctgggcaaacgcaaacaccggtggaatgatcaccgatgcaactgtcacgatctatgatcaggctaccacaggaaatgctgctgcgggttctccgattggtaccctgaagatcagcgacgctgcctatgtctcaggaaacctcgctacaaagaacgctacctaccgttactatgtctatgacattgcaatgaacgcaggcaagaagctgtccgacgctcgctcctttgtggttgcaagctctggcttctacaccaacgcggtcattgactcggttacagagtcggttgagatctacaatgcgaaccagactgcgctgatctacaaggttgatcgtgctaacgtcaagtctctccgttccgcagaagacccactcaacggcgcaatgaacgtcgtggttcgtcgaaagctcaacggtgttgctgacggatcgggttcggtcaccttcacaacttccgctaacgaatacttcgacaacgctggttcgtcgatgcttggttggtatgttgctggtggtgtgacgacttccttcatcccaggtccgctaaccgcgttcagcccaactagcattaccgtagcgctcggttcaggcgccgccggtgcatcggtatatgtgatcatcgacgtgttgaaaacaaaccagacagagcgcacgaaaacgcctcagaatctgactgttacaaccaacactgctcctgacactgctatcggtgcagaaattgttcttggtgtgactgacgcatatcgtctgaagagtgtcaagctgtttgttgaaggttcgcctgatacaccagtggcagacatcactgacgaatacaagatcaactctaacatcactgacaccgcatatcgcgagtccaagattgttcgtaccaaggctccaagcttctcgacgaacaactcataccgccttgcgatcaacttcgattatttcgagcacagcggttcacagggcttcttcactgttgactcctatgcaccggcacttaacgctgacgactcaggagtgacctatgagactcttggtggatacactgcttcgagtggtgttgtttatcctctgtctgcttccatcgacttccgtccagacatcctgggaacaaacccagtaacatctgttctgccagctaatgaaagcaccgcaatcttcgacattgagtattacctcgcacgtactgacctccttcagatcaacaaggatggtttcatctacgtaaagaagggcgagccttcggatgatccacgtcctccgaagactgacgacaacgcgatggcactctatgagatctggctttcgccttacacctactcgttgaacgacgttcgtaccaagttcatcgagaaccgtcgctacacaatgcgtgacattggctcgctcgagaagcgaatcgagaacgttgagtactacaccactctgactctccttgagaagtcggcacaggacatgtccatcaaggacgctaatgggcttgaccgattcaagaatggtctgattgcagacaacttctctgacttccaggcagccgatctgaccaacgtagagttcaaggcagccgctgaccgaaccaaggctcagctgcgaccaagcttcaagttgatgaaccgtaagctcgtgttcaatgcagctaagtcctcaggattccagctgtcaggcaacatggcacacctaccgttcactgagagcgttgcaattgagcagccttatgctaccaagcacctcagcgtcaacccatacctgcagtataaccaggctggccagatggtaatgtcgccaaacaacgacacatggtccgacacaacgatgcttccacagctcatcactaatgtcgacgccaacgttgaagcgatcaagaccattgttgaacagactcctgatcctgcaccaaaccctgttgttgaagagaaggttctggcggttgactggggtacgcacgtcgacctcaatactactgtcctaaataaggtagagactaagccagtaactggcggtggtggacgtggcggatcgccgtggcgcaacctcaatgtcttcacccgagctaactaattaaggctagaaatggcaactgtagaatcaagaactgatacatacgatctgggcgatatggttaaggacgtccagatcgtcccttacatccgtagtcgtagcgtcgagttttacgctaccaagatgaaggcgaacactcgcgtctatgcgttctttgacggtcaagccgtttcggagttctgccgagatattggtttccagcttagcgcgtctaatgctggaactgcctcgcagcttgttgagtttggctcgccactgattacagacgcaaatggtgagctccgcggtgagttcaagattccgggcggacgtttcttcactggtgagaaggagtttgtcctttcggatgacccaggactcactggcgatgcagacatgcagactacgagcgctaaggctgcttactttgctggtggcgttaatgtcacgaagcagaacgtcacactgaacgtagtttcaactgtcgtcatccctgatgcggtcaacccagcacgtgctgcacctgaacctgctccagcacctcctgctccggatccttcttgcttgaaggagatgaagaagtatcacccaaagaacttcaatgagatctgccaatgcgttgcaggtggtggaacctatggtgcctgcggtgaccctatcgcacaggcattcattgtcaacaacgatatgttcatcagctcgcttgatctgttcttcaagcaggttgacgtcttcagtgaccgtatctttgtccagattcgcgatatggtgaacggttacccaggtaccaacatcatcgctcagaagtactacagcccggatcagattcagccgttcgcgtctgatgattcgagcaaggcattcaaggttgttttcgatcagcctgtgttcctcgagtcgatgacgcagtactgcttcgtcgttggtggctattcgcctaacactcgcctctgggtctcgcgccttggtgaggaagtgacgaacatgccaggaaagattgttgagcagcagacgaccactgaggtcagcttccgttcgctcaatggtacgacctggaatgcagagcagtatgagcagatcaagtatcgtctctacaaggcaaacttcactcctggaaccatgagcctcgtattcgagaacgctcatgaagatgaggaagtgatcctgcctgaaaacccattccagactcagacaggtcagtcgcgtgtgcgtgtgttccttcgtgatcatggtctcaccacaggtgaccgtgtctcgatgagcctgaccagtgatacaccgttcacgattacgatctcggacttcgttccgcaggtcggtcagacgatgcacaccacaacaggcaagggtgtcatctcagacatcaagtcgacagctacagctaatcagtacgaagtgacactgaaggatatctccggtgtgttcactgcaggtcagacatactcgtgtgatgcaaagactcgcgaggttcgtgactggtatctcattagctccatcgacaccaagaagccagcgagctacacactcaaccagtgcttcggtacggttgtgacaaactcgtatggcgcaaagtatccaggtggaacgattgcaggtattcctgtctccgagttcaatactgagcacgtcactggttcgctgggtcactcggttgttgaagtttgctcagttgactcgttcatcatcaacctgacaacaccagctacgatgactggtcgctttggcggaagcggaatcgtttgctataacggtggtggtaagtttgacgtgttcaacgtttctggtgcttacctgccttaccgttcctctgagaactggacgcttacaggcgttggtcatggcgacaccggaagcctgttcgaggcagctaactatcagactcaggcaccaatcgtgtttgctccacaggaagacaagttccttggtcagcctcttaagattgcttcagcaaacaacgagcagatcatgctcggtacaggaaaccgttcggtgactgtcacggcgtcgttcaactcgactgatgctaccagcactccaatggttaacatggacaccttctcggcgatcatgatttccaaccgttccgagtggcaggacaagtcgaagatgacttcgattccatacgacgctacccagcctgtatggcacgctgaggaagagattgtcaatggttccgagatctacaagtatgtgacacgtactgtcaaccttgagaacgctgcaaacgacctctacctgtatgttgatgcctacaaggatctaaacgcagacttcgatgtctacttcaaggttcttccggtctacgcttcgggttcgattgaggcacgtccttggatcaaggcaaacgcactgaccaagtctcgttcttcagttgacacctcggatatggtcgagtataaggttgtcgcttctgagcactgcaccgcatacacctcggaaggagtcaactatgcaggttggtcagaagatccattcactgcattcaagatcaagcttgttggtcgttcgaagaactcctctaagccaatcctctttgagtcactaagagcaatcgctatcacataatggacgcaaaagtaagagactatccagaccttatcaagcgcggaggcggcgtggttaacaccaatcacgacgagtacctccgcgctaaggctcgtttgaaacaagcaaagcgcatcgacaatctagagagcgaggtaagggggcttcactcaaaactagacatcctgattggactactccagcatgatcaatctaaatgacatctcccttcgtctaatgtcgtatcaggcaactgtgcgacagacgattaccgccgttcagcaacagcagtgcagttctgacttcattgaccgtgtcagcattgccctaaataatatcgaaaatccgtctaggaacgaaacatggcaaaactcaactcgcgagaagagttcaccaactactgtctgagagctctcggtgcgcctgtaatgcgcatcaatgtagacgaccagcaggttgatgaccgaatcgaagacgccctagacctattctgggaatatcactctgatggttcggaactcgtattcctgaaggtacaggttactgagacgatgaagcagcagggttacctccagcttcctcctgagactcagtctgttctgcgcgtcatcaatgcaggctcgggtatggatggaggcggaaacggtatcgcaactatcaacctgcagtatcagcagtacatcaccgatatcatgaaccctcgccgcatcatgcaaggtgatggtctttcagcttactacatcactcaatcttacctcaacactttgaacgacacgttctctgctgaggacagaatccaattcaaccagcactacgataagctctatattcttggtgactgggatgctttgactgttggatcttggatgggcattgagtgctaccgccgtgtaatgcctgaggtttcgggcgatgtatggaacaaccgctggctcaagaagtatgctactgcacagatcaagaagcagtggggaacgaaccttgtgaagttttccaatgtccaactacctggtggtgttcaattgaatgctcaggaaatcatggatgaagcgaaggaagagattcagacgctgaagcaagaacttcacgacatgtatgaagagccaccgaatttcttcgtaggttaaatatctcgaacattaatcatttcgagaacctatcatggccttgaaccgctacttcaacactgcgaacgagaattccgaacaggaactctttgaggatctggtcatcgagatgatccagatgaacgggcaggacgttctctatattcctagagaaatctttgaggttgatcctgtccttcaggagccgaagaagactgtcttccgtcgcaacttcatcattgaggcttaccaaccggatggttacggctatccgggtgagcagaacatcatgtctaagtttggcttccgagtcaatcagactgctgacttcattatgtccaagaagcgtttcgctgagcttggaactggacgagagcgtccgatggaaggtgacctcatttatgtcggcaatccctacgatccagatttctctctgaccaatactctgtttgaaatcaatcaggtatggtacaaccaacctgactggcagtttggtcgccacttcacttacaagctagtatgtgagacctggactggttctcgtgagaagttccagaccggtaagactgcacttgatacaatggagacagtgtctgatgacagcgaggagccagcacgtgtcaatgaaggcatcatctctgcgaagaccggaatcatcgttgaccagtttgatcgccacaatccattcggtgacttctaatgtcaagacctcacttctattggcagacaactaaaaagctgatcgtggcatttgctacgatctttgatgagatcgaggtcactgatgactttggtcgaccttacaaggtacctttgattttctcccagaaagagaagttcattgaagccatctactccagtaagagtatgggcgagaccgacattgatatcacattccctcgaatgggtttcgagttggcgggtatgaactacgctcctgagcgtaacctcaacccactgaaccagattgtcgatcagatggatgacggtgaagaggtgatgacctacaaccgagtcccgtacgatctacagttcgatctctacattggtgctcgtaaactcgaggactctctaaaggtacttgaacagatcattccgttctttactcctgagctgtctgtcaccatccgtgatagagaggacttccagcttgagactgtggttcctgtcacattgaactcgacgtcggtgaatatcgactatgaaggaacctttgatacaaagcgtacgatcatgtggaccctaaacttcaccgtaaagggatactactatccggaccgtcgtgctaccaacatgatcaagcaaacgattcttaactttggtgacaaagattacgaaagaatcttctctaaatacacgagtacagtcacaccaatcgaagctggtcctaatcagattcacacggttgtggacacacatggatcacaattcgaggaataagaaatgacgtttgaagaatttctaggtgaagccatcaaaggatggaagcacgcacataacgaccttgcaaagcatcgtcgcgaacagtctcaggcaggaaatgaatggcatacgcatgctctgaacaagtctggtaaggaaagcggcatgcacgatgctcgtaagtcgcacgcatcagaatcagctgctcgtgctcaccatgaacagttgaagaagaataacccgaactctcatatcgcgcacaacctgtaccacaacggtaagcacgtcggaacgatgtaatgcaaaatgcccttgatgcaatctcacaatccctaggtgccgcaactcctgttgcgaccattcctcgcccatctcaagaaattgcgaaggttgatgagttcaaggaagcacctgagattgaagatgattatcaggaggctcgttctaatctgaaggaactaatcactcaggtaatggaatatgtacctgaggtagtagaactgacacgtcaatcacagtcagacaagatgatcaatgcgatggccaatctgctaaacacagcagccaatctcaacatcaacttgtctaagctgtctaaggacatcaagcaagctcctaagggtaagggagtcgttgccggctctccacaggaagaagttgctcaggtatctaacactacgaatattttcgttggttctacagaagagttcttggatatgatgatggagaaggataagcgtgccaaggaagctgcaaaggcagcccaagcagcttccgtcatcgaaggtgaatgcacgacagtagagacgtaacattccattggactcagaagagccttcggagcatatcctcacttcgttcggaattcggagactctgacgagtctcctcatagtggtcataatgtctttctgaaccttgaattttaatcacaattcggccaagctggctcaaatgatgattaagagtttaatcacaagactggtctgaccctatacaggacacggggaatcggtggcgccctattagtcaggattggtgcaattaagcaatcccgccagtccatatgccgcacagtctctgagcatatgaacacaccagttgcaaagtaagcagagctggtcaaactttaagccgtaaaggctctttgaattgtctctggtactacactcaacagactctatctcacgtcgcgactacgcttagccgacggctagttctgatctaattttgagaaacaattggtaaatattcttacagacatatggtaaatgatttcctgtggttggacaataagacttggaaacaatatgaaattcgataagacataccatggtgaaatcaatcccatggatcagtacaatggattgaacaaccttaagaaggcaggtgtcaagattcagatgactcctgaacaggctgaagagttctacaagtgctcacaggacttcgagtatttccttgagaactacgttgagattttgagccttgaccaaggcactgttccgttcgttccgttcggctatcagcgccgtgcaatgaagaagatcgtaggcaaccgattctcaatcctgcgatggccacgacagatgggtaagactacgacagtagcagccgtcctgttgtggtacgccatcttcaacaagaagtacaacatctacgtgctggcacagcagcgtggtcaggctatggaaatccttgatcgcatcaaggaaatgtacgagtgcctgccatggtggttccagcctggtattcacacatggaacaagggctcgatccagctgggcaacaagtccaagatcgtgacagcagctaccggtggttccggtgttcgtggtaagtcggtcaaccttctgtatcttgacgagttcgcatgggtcgataacgaccatgagttctacacagcaacctaccctgtcgtctcttcaggtgacacgtccaagatcatcatcacgtctacgcctaacggtatgaacctgttctacaaattgtggacagaggctctgcgcggtgacaacaactatgtctgggacgatgccttgtggcatgagcatcctaagcgagacaaggcttggtatgacgagcagatggctaacatgtctgagcgtcagttcaatcaggaattcatgtgcgagttccaaggttcgtctgatacgctgctctcgccggcaactcttcagagactggtcttccagaatccgattcgtcttcttggtgaccacaaggaattcaagatctatgaggatccgattcctggacacttctacgtcatcaccgttgacgtctcggaaggtgtaggtaaggactactcagttgtttcggtcattgacgtcaccgaggcgccttataagcaggttgcaatgatgcgatcaaacatcatgtctccattgctgctggctgaccttgttgataagacaggtaagaagtacaacgatggctatgtgatcgttgagtcgaacacctatggtaagcaggttgttgatgccctgtggatggactacgaatatgagaacatgcttctctcccgtggtggcaacaacgatgcaaagatttcgggcgcgcgcaatgagcgtatcgcaccaggcgtcaagactacaaagaagaccaagcagatcggctgctcaacactgaagggtttgattgagtcgagtcagctcatcatcaacgactacgacactatcgaggaactcaactcgttctctaagaagggaacaagctatgaggctgagaagggcaagtacgatgacattgtgatgagccttgttatcttcgcgtggttctctgcacagccttacttcgaggacacgtttgatcagaacacgagagatctagttcgtcaaaacatcctgcaggacgctgagtatcacactgccttcggattcatggacgacggcactgacgatggtttcgacttcggctttggcaagcagagtgaggaattgttggagactttccactaacctgagaacataaatatctcagacatattgcttacatgaagcacgatttttgatctcaggagaatatagatggcatcatctaatctaagccctggagttggtttcactgaaactgacctcaccaacattgttggttcttctggcacctcgggcggtgcatttgcgggtgactttgcgtggggaccagtcgagcagattgcgacagtgtcttcgccattggaactcgagaagacctatcacaagccagatgacaagaactacacttcttggttctctgcattcaacttcctcgcttatactggcgacctgaagattgttcgtgcggctgacgaagatgcaatcaactcttcggatgacggcaacggcttcctggtaaagaactcgaaccactttgaagttgtcaagactgctcctacaactgtgcagttcgctgcaaagtatccgggtgcactgggtgactcgatcgctgttcacatggctgacgcttcgacgttcgctggttggcagtatgcgtatctcttcgacactgctccgggctcctcgcagtgggctgaatcccttggtgcagcgaatgacgaacttcacatcgtgatcgttgacaagcagggtaagttctcgggcgtggttggttcggtgcttgagaccttctcttacctgtcgaaggcttcggattccaaggatgcgaacaacggtcctaacttctacatcaacgtcctgaaccgtacttctaagtatgtctgggcgctggctcttcctactggcgcagatctgtctgctccttcgaccggtaaggttgcttcggtaactgtcggtgcaggtggtactggctacactgcggcaccaaccgtaacattctctctgccaccagcaggcggcgttcgtgctaccggtactgcaactgtgacggctggcgctgtaactggcgtgaccatcaccaatgcaggttccggatacgtcacggctcctactatcacattcgcaggagcgggtacaggtgcaacggcaactgcggttgttggcactgtcactgacgctgcagaatggggtactccaggtgtggttgcaggtgaagcacagaccttcaagcgccttgtcgctgtaaaggctgctcctctgaccggtggtaaggattcgactgctatcactgcaggtgacctgactcgcgcttacgatctgttctcgaaccaggaagaagtcgacgtatcgttgatcttcactggcgatgcaggtggtgagactgagcacaacgttactgtccagagtgcaatcgacaacctcgctgaatcccgtcgcgactgcgttgttttctactcgccacagctctccgacgtcctgaacaagactcagtctgacgcagtgaacgcagttgtatcgactcgtaacctcgttggacgcgcaagctcctacgctgttatggactcgggttggaaactccaatacgacgtttacaacgacaagtaccgttggattccgctgaatgctgacctcgcaggtctctgcgcccaggttgacagcaccaatgatccttgggtcagcccaggtggttacactcgcggtcgccttaagaacgttgtctcgctagcgttcaacccgaacaagaccagccgtgatgcgatctacaaggtcggtatcaacccagttgtcacgttcaacaccgacggaactgtcctctacggagacaagaccctgcttggtaagaactcggcattcggacagatcggtacccgtcgcctgttcatctccctggagaaggacatctcgactgctgctaagtattacctgttcgaaaccaacaacgacttcacccgcaacaacttcgtgaacatggtttcgccgaagcttgagcaggttcgcggtcgtggtggtattgaggacttccgcgttgtgtgcgatacgtcgaacaacaccgccgaggtcatcatgaaccgtcagttcgttggttcgatcttcatcaagccagtctactcgatcaattgggtccaattgaatttcgttgcggttcgccaagacgtttcgttcgacgaagtggtcggtggtacattctaagaacaactactcgtagtattcttgagccccgggaaaccggggcttttcttttgcctaaatagaacgatgacaattggtaacctagcatgacatttgaagatttcctatacgaagcgtttggcgtgaacgaggttgttacctacggcacaaacccgacagctgacaatggcgccttctcaagacatgaaggttctattcacacctacatcctgttccgaggcaagaagtttatgatcttgttcctcacacaggacagctcaatcacattctcattggtcagcgagaagaaccttgattcgactttgattcctcaaaaggagtctaaggatggtctcgtgttctacaacaagatcttctcagctatgaacgtggtactcaatgccgcacacgctaagaagttccagtttgaaggtgagacagatgagctcaaagacctctatagcaagttcgtgtccaaccgatcattcctcagaatgctcaaggacaaaggctggcgatatgatggagagaagtacgaaggtttgtatcttttctcgaaggtgggctaagcctcctttctgtaaatatctacatctaccataggtgatgtgatatgactgcttttacatatttgattggatggcgtgagcttgatgtttggtactacggttacaagaaggcagacgtgtctgttctttggaagacctatttcacatcaagcaaatttgtcaaggaattccgtgaggaacatggcgaaccagatgtggttcgagttcataaggtgttccctacaaaggctgaggctcacgcgcatgaagagaaattcctagaacgtgtcaatgcggttaagagtccactatggcttaaccgacataacaaggacaaattccgaggtccagacaaattctctcccgaatcactggctaaaaaggcagccactgtcgctaagaaaatgggagatcctgaatacaggaagctcaaaagcgaagctgccaagaaggcatgggaaaccaaacgagctaatggctatgttggtcctaacaaagggcgagtgttttcccaggaagtgagagacaaaaagagcagagcgatgaaaggtcgcaaactcacagaagaacataagcgcaaagtgagtgaggcaatgaccggaatcaagcgtggtccgcgcaagactcctgtgtcagaagaacatcgtgctaagctcagtcaacgtgcgaaagaacaatgggctaagaagaaagcctcgcactaaataccgatgattctaaatgtatggttgagtccataggaatcattctcaactcaatctattaaggagccattcagatggcgcaagctgacgtatattctttcctcgcaaatttccgtggtggcggtgctcgccctaaccgttaccgcgtcaacatttccttcccgctgtctgtaggtcgcgctgttgaagcagcaactaagatcagcttcacctgccagtcggcttcgattcctgaatccacactgggtgccattgacgtgccttacatgggtcgtcaggtaaagatcccgggtgataaggtttggggtgattggactgttcagatcctcctcgacaacgacttcctcggacgtaccgttttcgagcagtggcaggatcagctgcttggtttccgaaccaacgttgctcagccacagatgctgaatccgatcttctcgtatgcacaggcagacatcatcactctggaccgtgcagaccaggaagtacagcgttaccgcgtttacggtatcttcccaacaatggttggcgaaatccagctcggctacgaccagaacgaccagatcgctctgcagccagtgacgttcgcaatcaacggctgggaatctacagctacccgtttctaagctatgaaacgaaggacagcccagtgaaatatctgggcttttctttggattaaatatcatgtgaaaccatgaaggaactatcatgcagatttttggttacgaattcgggaagaagaaagaacctacacaagagttgaccacgttcaatatcgaccgtgagactacctctgaggtcgtcgttcctgagacctattacaatgaccatgcgggcgtcatgtccgttccgtatgagttgctccagactccggcggatgaagccgaacttatccgttcttaccgagaccttgcatctaccgctgaggtcgatgaagccctgcaggaaatccgaaacgaagttttcatcttcgacgttcctggtaagaaggctgttgaactagattttgtcacagagtctaagctatcagctgcgatgcgcaagaagattgctgcagagtttgatgaagtttacaagctcactgactttgatatcaacggagcacagtggttcgacgattggtatgtagactccaagatctacctctacaagatggtagattacaccaagctcaaacagggtatccagaaggtccagttcattgacccactcaagattcgtcttgtccgtgtcatgcccaagcctaatcctgatggaaccttcgatgccgctaaggtcaagcagttctatctgtatagcaactttgatcctaagtctcatccgctcaatcaggttattcagctccagcagggtacatcaatccaaggcattcaaattcgtccagagagcatcacatatgtgaactctggtctgtttgatcgcaaccttggtcgctttgtcggttatctgaagaagtcgattgtaccattcaacatgctgaagatgatggaagatgcaatgatcatcttccgtgtcgttcgtgcacctgcacgtcgcgccttctatgttgacgtgtctggtctgcagaagaacaaggctgaggcttacatcaaagacctcatggccaagttcaagaacaagatggtctatgactcgaagacagggcagctgtctgatcgtcgtaacatcatgaccatgttggaagactattggctgcctcgtcgtgaaggcaagtccactgaggttacgaccattgaaggtcagaactctcaggacatcatggatgaaatcgaatacctacgcgacaagttctggcgttcgctaggcgtacctcgcagccgcttcggtgaccagcagactccaaacctgtttggtaagggtaacgagatcactcgtgacgaatatcgcttcacaaagttcctgcacactctgcgctcgcgattcattcctgttctggaagacatcctacgcactaacctgttgctcaagaagatcattactgaggcagactggaacgatatcaagcgcgatatcatctggaactacactgaggacaacaccttcgttgaatcgaaggaaacggaaatcctcaacaaccgtctcaatactttaaatacaatcgatcctcatgtaggcaagtatttctccaagctgtatgttcagaagaacgttcttcgcatgtccgagaaggagatcgcagaagaagataagcagcttgcaaaggaacacgcatcaggcatccacgatgacccagatgcagaagacggcgacaatggcgcgactttcagcggtaacgctccgcctcaaggtcaggatgacggagaggaacaagagtttgcagacatccagccgggcgacaacccatttccaacagattaaaggagccgattaatggcaattgatatcaacaaattgaacgcctacgacttcatcaaggaaatgaaaagccatatggctaacgtccttgaggagcgtctagagagtggtgaggtctgccctccgctgcctctggaagagcacgtagctaaggatacaaccgacaccgattggactgcaatgggtgaggctgaaaagaacctagtcatctcgctccgtgagaacggtcgccagcgtggttcagacgaaggtgcttatgcatctggtgtcctttggctgacattcaagaacaagaaggcttgcgaagactactgcacctacctcgaaactgccgatggcgttgacacctatgagattgaagctgtacgcgaagatctcgtgaacggttttgtcgaagatcaggaatatgacttcggtgacattatgttcgacaaggactttgagttcaacgtctatgtctacattgatgcagacctagttatgcttccggctgaagatctcgaagttggcgacgagtttgaatgggatgacgattcagacaacggtttcctgtccgaggttcgccgaaagatcaaggtaaacttccgcggtaagaagcgcatcaagatgcagtgcagccctggattcaagtgggatgcagcagctaagacctgtaagaagatctctggtgctcaggtagctgttatgcgaaaggcaatgcgccgcgcagtattgaccaagaagtcgatgggccagtcgttcaaggcacgagtcgttcgcaagacccgcaaggctaaccgcttccgtaaatcatttggactgggacgctgagatgacgtttgacgaatacctagcagagcaaaacttggctgcgatggctaatcatcacttcactaaggctaagcgccacaaagaaggcacgctgcattggcataagcacaatgcgcgtggccacgcactttgctcacaacatcacgataagaacggcgaccacaaaaaggctgccgagcatcacgccaagtgcgaagagcacattgccgctgccgaaaagatcgaagatcagaagcacggctattaagtagaagagagaacagggaatgcaagtactagtagaacgcattgacgatgttcgtaatgaaatcctcgttgaggaagttggtggcatcaagcacaagaagtacatcatcgaaggtatcagcatccaggctgaggtaaagaaccgtaatggtcgcgtttacccaaaggaactgatcaagcctgagatcgatcgcttcattcgtgaagacattgcacttggacgtgcggtgggtcacctcaatcaccctgcaaacgatccgcgtaacgactataaggaagtgtctcacaagtatgagtcgctgactgaggacggcaacaactggatcggtcgcgcagtcgtaaccacaggcacaccaaatggtcgtatcgttgctggtctgatggatgaaggcgtgaacatgggtacgtcaactcgtgctcttggtaagaccaagatgttcgagcagcgcggtcagaagacagctgtggtgcagagctttaggctcatctccccaggtgacattgtatctgatccgtcggcaccagatgcatacctcaccaacctgatggaaggtaaggagtgggtttgggaaaatggtctcctgatggaacgtgaagtggagattaagaaggagatcaatcatgcagctcgcacaggtacactgaacgaagcgaagatgattgaactgttcaagaagttggttgctctgagcaacggacgcgaagtctgagaatttctcagaactaaataccatagaacttaaaacatcattctgaaagatcttaggagtaagtaatgaatgaacaactaaaggaacttctggagaccctagagctttcagaagaaaccgcaactcagatccagaccatcctgacagaagcattcgcagctgcaaaggaagaaggtaaggctgagggcaagaaggaagctgatgaagctgctgacaaggacaaagaagcccttgaagaagcacatcaggaagaaattgcgttcctcaaggaacaggctaatgcctacggaacccacctgaaggaaaaggctaacgcttatggcgagtcgatccaggagtccgttgttgctaaggctaaggagtatgctgagttcgcagttgatgcattcatcactgagaacaaggaacgcttcgtagaaactgaagagttcgctcgcatgaaatctgcgttcgagttcatcaaggaagcatttgagaagaatgcgttccaagttaaggaagatgctgctgtaattgagctgacagagtccctacaggaatctactgctcagtatgagtcgctcttcgaagacctctctgctgctaaggaagagcttgcacagcttaaccgcactctgattctggagcgcgcaactgctgatctggctgagactcagaaggagaaggtaaatgaattgcttgaggctgtctcgttcgattctttggatgagtacaaggacggcgtagcaatgatcgttgagcaggctaaggctgtggctgccccagcacaggttgcacctctcgccgacaccccggaagtgctcaacgagcaagcgaccccggctaagaaggaagtcaaccaggatgtcaagcgcctgatgggcaagggccttctgtaagttgaattcccagaacataaatatctgagaattgtttaattcgtatttgagatttttaggagaacaaaagatgtctcaagaagaaaataaagtggataccctcctagagaagtgggaaccagttcttgaaagcgaaaaggcagatgcaattactgacccgtatcgcaagaaggtaactgctcagcttctggagaacacacaggaagcactgaacgaagcttcgaacctgaccgccggcgtgcagaactgggaccctgtcctgatctccatggtccgccgtatggctcctaagctgatcgcttatgacatcctcggtgtgcagccaatgaccgctccgtcgggtctgatctttgcactgaaggcacgtcgtgctgctaccccaccgaacactggtcctcaggctggtgcagaaatccttggtctgcaggaagctgatacttcgtactccggtaccggtactcacgctgcaatcactgatgcaaacttcctgactggtttcgcgaccggtactggtaaggtcacatcggctggtgaagtggatccatggaactcggtcggcgtcaccatcgacaaggtcaacatctcggcagttacccgtcagctgcgtgcagactactccattgagcttgctcaggacatgaagcgcgtacacggtctggatgcagatgctgagcttgttcagatcctcagcaacgaactgatctccgaaatcaaccgtcaggttgttcgtacggtctacaacgctgctaaggtcggtgcgcagtttgcttcgtccccaggtaccttcgacctgaatgctgacgctgacggacgttggtctgttgagcgcttcaagggtctgctgttcgcaatcgagcgcgacgctaacgcgatcgcaatcgagtcccgtcgtggtaagggtaacttcctgatcgtctcgtccgacgttgcttcggcactcgcgatggcaggcgttctggactacgctccagcccttcagggtcaggtttcgctcgaagtcgacgcaaccggtgcaacttatgccggtaccgcaggtcgcttcaaggtctacatcgatccgtacctcggtaccgatgcatacctggtcggcttcaagggttcgactcagtacgacgcaggtctgtactacgcgccatacattcctctggaactgcaccgcgctaccgacccaagcaacttccacgctgctctgggcttcaagacccgttatgcaatggcagagaacccattcgtgggcaactcgaccagcatcggttcgaacgccaactactactacagaaaggccctcgtcaagaacctcatgtaatagtgaggaacttgcaggtcactgtaaggttgcaacaagacccgcttcggcgggttttgttttggttggtgattctactatcgcaaggcataaatacggatatggcatatacatatctgatcggctggacacagcacaacaaatactattacggaatgcgcagtgcgaatacggtttcgcctgtcgatgatctctggcacatctacaagacttcatccgcctatgttgaccaatttttagcacagtttggtgaacctgacgtgattcgagttcacaaagaattcgagaccaaggatgaggcttatctatttgagacgaagttcctaaaaagaactaaggctcatatcaatgacaaatggctcaatcagaatatcatgggtcgcccacaaggtggaacacctgctcaacttgctgctgtcaagggaagaaagcagtctgacgaacataaggcgaagagaggcatctataatccaaagtcagaagagactaaggcaaagatgacagaggctcacaaaggttctaaaaattcgcagttcggaaagactggcgaggcaagttcacagtatggtcgcaaacgcacacctgagcaacttgagaagatcagggaaggcgttcgcgcagcttgggcaaggcgaaaagctaacgaacaatgatcgtacatctctatgatgcatctttcttgactgttaaaatgctcttgaaccagatgggtagcaaatagaaagaaagttagaaagaaaataaagaaaggagtatagatgccaccgaggtgtcgtgcccgaggctaaaagattcggcatgtagtacatagacacacgtggtaggtgtagcttttaagcaagaaagtgagatcccttgatactactaggtttcagtagatgaaggggtaattttgaaaagccgtagaacccttgatattactaggagttgcgtatgcagttttattcttcaatgaccttggcagactttgtagcagccaattggacactgatggaccctaatgtggttagcctcattgaacgagaagcagatcgtcttgctgagttggaagaagatgtgatctcgtggaaggcaatttcggaagacattgttgatgccaatgaagacaatcgtgattacattctcaatcgaattgaagacatcaagaaaggttcctacactctagatgagcttgaagagttcgttcgtcacatggatacctcagtatgatcagactcattggactaacaggtaaggcaggaacaggcaaggacacctttgcaggtttcatcaacaaggccatcaattttgaaccgtattcgtttgcaggtccactcaaggatgcttgctgcggattgttcggatggactcgtcatcagattgatcatgacagggaattcaaagaggcaattgatcctcgttggggtttcagtcctcgccgtgcaatgcagttgatgggaacagagtatggacgtcagatgcttcgcgatgatatctggattcacatggctaagatcaggcttgatgaaactcgtaaggcaggtctgctcgttgtggacgttcgttttgagaacgaagcatcatggatcagagacaatggtgggttgctcatccacattgaacgtccgggagcaaagtctgtggctgcacacgcttctgaggcaggtgttgcctttgaggaaggagacctggtcgtcaccaactccggatcattggatgctctccagattattgcacagaacatcgtggccaacctgagattgaccgattaaatactggcatgaccagtaaaacaatcaatcgaaatccagcgatcaacaccagctataagctcgagattccgggctttgattcgctgaactactttgtgcagtcaaccgaaatcccgtctctatcttcgggtggtgttgaaaccgcatatcaaaactggggtacgaacgtccccagtaacagaatcgagtttgatcctctgaacgtcaacttcttggtgtcagaggatctaatgaactaccaatcgctctatgagtggatgattcagatcaccatgactgagcctgtagttcctgagatgatgaagaacattgttctgcacatcaccaactcgtctcgtaatcacaagatgcagattcgattccataaggcatatccgaccatgttgggttctatcccatttgattcgggtgtcaatgatgtgaatcctctgctctgttccgcaacattccgttatcaatactttgagattattcgcgatgcgtctggacgaacttcaagctgagattgccgttgactctgcaatcaataataatgccctggatacggaatccctgaggattccgatgctgcactcgaagtactacaactacttccttacagagcttcgtattctgaaaggcatcgagattgaatataagcgtgtgaagaaagaacgccaccagtattggctgggacaggcgagtgatgaagtctacaaggctgagcctaaagacatcaaaatcctcaggcaagaccttgaactgtacctcgatgcagatgagaagttgactgagctgaaatcgaaatatgagatgcaaaagatgaagactgagatgctcgaagccttcatcaagacattgaacacaagaaacttcctaatcaagaactcaattgaattcctccggttcaagaacggcggatgacataggcacgaagaatgcaagcagatatcaaacttcactataagaacgaactacacgtcaccctggactgccctgttggcgtctcctacgaagtgtctgaggcgtttgcattcttcgtcaatggctacaagttcatgcctgcgttcaaggcaggtcgttgggatggtaaggttcgcctttacaacatcaaggaccgtaacttctacattggtctgctgccaaagctctttgaatgggctgaggaaaacggctacaccattgagtacgctaatccgaaggactttgagcgccagtacccaaccatcaatgaagagtcttggaacgagctgaagaagtgcggcaagtttgagcctaagtggtatcagaaggaagctgtcttcagggcaatcaatgagtctaagactctgatcctgtcgccaacaggctcgggtaagtcttacattcagtatctgatcacgcgttacctgcttgatcacactgatggtaaggtcttgatgacggttccatcgacgtcgcttgttgaacagatgttctctgacttcaaggactatgtagctgacgattgggacgttgaagagaacgttcaccgtatctactctggtaaggagaagtacacagaacaccgagtcgtcatctcgacctggcagtctgcgatcaagctacctaaggcatggttccagtctttctctgcctacatctgtgacgaggcgcatggcgcagacgcgaagagcatttcgcagatcattgaccagcttggtcatgctcagttccgccttggtctgacaggtacactcgatggaactaagatgcacgagcttgacatgcaggctcgattcggttccattgtgcgcgttgcctcgacaaaggacctgcaggatgaaggttctctggctccgttaaacattgagtgcttccagctgcgatacagcaaggatgatatcgctctcgtgaagaacatggactatgatggtgagatcaagttcttggtcagtcatccgaagcgcaattatctgctcgcaaagactgcattgacgcagaagggtaacaccttgatgctgttcaactatgttgcgaagcatggaaaggtgctctacgagttgatgaagccaatgtgcgagaagtacggaaagaatctgtacttcatctcaggctcaactgctgttgatgaccgcgaacagattcgtcagattctggagaaggaaaacaacgccatcctactcgcatcgtatggtacgcttgcggtaggtgtcaacgtcaagaacctgcacaatctgatcttctgtcacccgatcaaagccgtcatccgaacccttcagtcgattggacgaatccttcgaacggcagaagggaaacaagatgtaaaactcattgatatcgcggacgatttatcctatactacacgcagtggggtaaaaaagcagaacacaattctgcgccacttcctagaaaggctcaaaatctacgtaggcgagaaatggaagtacaaaatcatcccgatcaagatgggcgagtaagcgaaaactcagctgtagatttggtaaaggtcgaatcgggtaaggcatatccgattcggctaatgcacttcccaaacggtttgaatgtcattggttatgtgattgcagtcttcccagagactacgatggttctgcgaccctatacggtcacagttgattacaatgcacatacagataatgtcgaaggatatgagttcagtcctttcctggatcagatggcatatttcaatcctctggatttgacgccggttcccttcatgaacaatcagatgatcgctattgtgcgcccatcagaacatgtggtgagcaattacaccggcgtgatcaggttgagagaaaagattgcatctacccctgacgatgaacactttgagatcctagtatctcgagaggttcctgatagtaagacacttcactaatacggcattttcagcattgaccgaagacaagaagaaagcaaatcactatgtagacaagcaggcgctctacgctgacctgtgtgaatggaagattcggaaagacacggcaatcgctgaaggcaggaaggcaccacccctaccagattcggttggcgatgctatcatgaaggtagctgagggtcaggcatcacgtccaaacttccgtaactatacctatatcgaagagatgaagggcgaaggcatcatcgcagccgttcgcgctatgaactccttcgatccaaagcgcctcggtaagaacggtgaggttaacccgttcggattcatttccctgtgcgtatggcgagcattcctgggctacattgcctacgagaagaagctccaaaagactaagatggatatgatgactgatcctgtcaacgagttcttctcgacgatggatggcgatcacggtcactacatcgacaactacgacgtcgttgaattcatgagccactgaggtaatcatatgaagattgcaatgattaccgatcagcactttggtgttcgcaatggctccaagttcttcttggacaactacgagaagttctacaatgagatcttcttcccgactatcgacgaactaggcatcacgcacctttggatgcttggtgacttttgggaatacagaactcgtattgacgtggttactctgtggcgcgctcaagagatcttccttgaccgccttgaggaacgtggcattcaagtaaccatcatctatggtaaccacgacgtcgcctacaagaatcgaaacgacatcaactcgatcgacttcttggcgaagatgtacaagaacatccatgtggtcaagacgcatgagacgattgagtttgatgggactcctgtcaacttcctgagctgggtgaacaactccaacctggcagatagtctcgagttcatcaagaactgtccgcctaccatcctgtgcggtcactttgagatcaagtcgtttgaaatgatcaagggtcacgtatgtgaacacggcttcgacaagagcctgtttgatcgctttgatcaggtctattcaggacacttccacacggtctccaccgacggtcgaatcttctacatctcaaatccatctcagaccaattggtccgactacggtctagacaaaggtttccgaatctttgacacgaccactcgagagttggaatttgttccaaatccgtttgatgtctactccaagatcgcctataatgacgacattgatatcgtagagtttgactacgatggatatgccgataagatcgttcgtgtctatgtgcagtcttactcttcgacaaaccagcacaagctgagtctgttcctcgagaagttgaacaaggttgtctatagcgcagacctgatcgagatcgacgagactcaattcaatagcgagactggtgacctgcaattcgtagacaaccatgagctgattgagaaatacatcgaagaggttgtccagagcccaaccattgacaagaacgtcctcaaaggcatgttcaaggaaatgtaccgtgaggcactggatatggcagagacagaatgacaacttatgtagatgaaatgagaacagagcttcttggatatgcggctcttgatcctgaaatccttgcattcatgcgcaagcatttgcctaggatcatcgctgaagaacttgtaggtgtccaaccaatggatgaaggtggcaaggcctttgaggagctctatcagcatcttaaagcgactaacaaagcctttgtcttttcgagcaattttgaatgatctattttcgtaaactgagattcaagaacatcttgtccttcggcgacgttatgaccgaagtacagctggatcgctcaccatcaacaatggtcatcggaaagaatggtgtcggtaagagttcgctcttgctggacaccctcgcctttggtctgtttggtaagcctttccgcaagatcaagaaagagcatctgatcaacactaagaatggtagagatgctctggttgagattgagtttgacaaggatggcaagagctaccttgttcgccgaggcatcaagcctggcatttttgagatcttcgaggacggtaagctcctgaatcaggaagccaacaaccgcgactatcagaagatcttcgagcagcaaatcctctgtatgaactacgacgctgcctgtcagatcattctggtcggtaaggctcagcacacgatgttcatgcagctcaacactggcgaacgtcgcaagtttgttgaggttgtgctgaacctgatcgtgttctcaaacatggcacgtctgcacaatgcaaagacgaccgagcttcgtaaccgcatcggtgaactcaagactgcaatcactgtcgcagcagagaagatcaagatccgtaagaagtatattgatgacctcaagaacgctgataagcaaaatgcagcagcagaacttgaacgtatcaatgctcagattgacgagatcactgctcagttgaccgagctacatgcgcgtaagagcgagattgaaacggtcgaaggtattgacagggatgcctataagaaggcgatgaatcatctgtctgagcactccaagatgatcgtcaagctggacacttcgctgtctcagattgagaacagtctgcgccagttgaacaagtctcaggattgccctacctgtcatcgtcctctagaacatgaggatcatgctaagcaagtcgatcaccttacagacaagaaagccaagatcgatctggcaaagatggagctgtctgttcgcattcagcaatttgagtcggtcgtggctgaattcgaggttgcggttgctaagtacgacgcttacatcgacaaggttcgctcggttgacatgcagattgcatcggctgaatccaagcgagacttcctggtcgctgagacaaagaaggaacgtcacagtcaggcagacaagatcaaggaagcaaacggcgagttgaaaaagctcgaggacatgcacaccgctctggtagacaagctggaacagctttatactaagagtgattacatgagcctgattggaacgatgctgcaggacaagggcatcaagacaatgctgatcaagcgcttcattccgatcatcaaccacgaggtcaacactcacctgaatcacctcggtctgttcgtcaacttccatctggatgaaaactttgacgaaacgatcaaggcgcgcggctttgatacccttgggtacaattcgttctcagaaggtgagaagctgcgcatggatatggcgcttctgatggcatggcgtgatatcgcacgaatgcagggcaacgttgcaacaaacatccttatctttgacgagatctttgacagctcacttgaccaaggcggcgctgacgcattggcagacatgcttgcactggtgaaggacttgaacgtcttcatcgtcacgcacactccagagaagatcattgacaaagtccgttcaaccatgaagatcgagaaagtcgacgggtttagtagaatcgtatgagcacattctttcaacagttcttcgaggacacctgtaaaaacgtccttagcaatcatctcggcgagttgtcggatgaggtaacatatcaagagatccgtattgatctagccgaatatgctagactaacgggagtccaaattgttatgaaggtcgttggaccaaggcacctgaacttctctacatggagtcaggacgttcagtatttctatgactaccaatggtaaaagatcatgagtaagcgtttgacccagtacttctatctgtacgaactcggtgagaacaccatcaccgagcgcatcacattctttgagggcgaacgccccgaggctcttgccattcccggttggaagggttggttggacgagttggtccatgcaggtgaagctgcattttgatacatgcctgaggttacatgttgcctcagtcacctacctgttagtataagcacatattgttcacttaggagttgtaaattatgagtttgtcatctgaaactttgaatgttctgaagaactttgcctcgatcaaccagggtctcctgttcaagccaggcaatcgtcttcggactctgtccgttctgaagaacgtgttcgctgtcgctgaaatcaacgacgagattactcgcgagttcgctatctacgacctcaacgagttcctgggcacgatcagcctgttctccaagccgcacctgaccttcaatgaagatcacatcctgattcaggacggcaagaccaaggtcaagtacttctatagctcgccggcagttgttgtctcgccgccggacaaggatatcgtgctgaccgatccgctgctgaccttcgaactgaccgaaggcaacatcaaccagattcagaaggctgcggctactctgaaactgaaggaactgtcgatccgcgaaggcaagctgaccgcactcaactcgggcggcgttggcaatcagatcaccattgagctggataccgaaggcaagatgagcgacgagaagctcgtcaagatcgagaacctgaagctcatcgaaggttcgtacaatgtcaaggtcttcgagcaggcagttgagttcagccacatgaccaagccgggtctcgtctacctggtcaccgtcgaggccaagtaagatgacggccatcttcgggaacattctcgatcaggcgctggagctaaacctccagcgccaggccatcaatgctaactaccgacacaacttcgagcctcacatgtggatgcgcgagttctgtacggttcgcctgcagatcggtcgtggttgtggtcacacaatggcaatccgctctcgttctaagcgagatgatttggtgattgttccgtcgtcattccacatcatgacgatgtctgagaatcgagttgagaagcctactgtcatttcctcgacagatccgaacgccattgtccttcgcggaaagactttcaagcgaatctgggttgatgatgcttcgattcgttctgatggtgatattcggaatgtgtatgtgattgcattgatgcatcgtgccgaacaaattatccttgtaggctgatttaacaactgtgagatattgataatgagtgacgagaaagaaatgtacctgtggagtgagaactatcgtccgcacactgtgaatgactgtattcttcctccacgtttgaagacctacttccaggcaattgtggataagggacaactggctaacatgacgttggttggtggaccgggtacaggtaagaccaccgtcgcacgtgcgatgtgtgaagagctgaaaatcgatcatatcgtcatcaacgcgtctgagaacggcaacattgagacgattcgtactacggtacgacagtttgcatcgacggtcagcttcggtggtggcatcaaggccatcatcctggacgaggcggacggtctgaccaagaatgctcagcaagctctgcgcgcctcgattgaagagtttgcaggcaactgccgcttcatctttaccggcaacttcggaaaccagatcatcgaacctctgaccagtcgagcaccgatcgttgagatcgtcttctcgaaggaagagaagaaggctctgctgatggagttcttgaagaaggttgcaggtgtccttaagtcgaagggtatcgcattcactcctgaagaactgactcaggttatcgtcaagaacttccctgacttccgtaagacttggaacctgatccagcgttattcggctaacggttcactcgagattacgagtcagactggtatcaatgatggtgctctgaaagaactgattgattacctaaagggtaagaagtttggcgacatgcgcaagtgggtcgttgatcacctcgacaatgatgcagcatctctgcgtcgcagcctgtatgaaaagatggctgtctttgtcaagcctcagagcattcctcagctggttctgatcatcgcagagtacgactataaggaaggtcacgtcatggacaaggaaatcaacaccgttgcgatgttgactaccatgatggcggacgttgaattcgtataaatatctaggaggtaacaatggcatctatgagtccatttgatatcgcctcgcacatcaacgagaagaaaggtgtgctggatgttgaagaaattggctatagttcgtacgtagtcaacaaggtactgtcgaatacaattgatagtgtcttgttcgcgaatgagatgaatcgttactggggacttccaacccaggcgcaatttgacttctattaccatggtctgccgaagaagaagcgtttcggcaagtggcacaagaatcaggacgacaccgcgtcgctcgatctaattcaggaatactacggatatagtcggaaacgagccaaagatgtgctcggacttcttcgaccttatcttgatgacattcgcaaagaattagaaaaaggtggcaaaaatgtcgcaaaacagaaagcaggaacttcttgagtccttctttgaaattgaacctttgaacaaggatcagtttctaaaggtacgtgaaactttgacccgtattgggttgccgagcaagcgcaatggtgatcagactctttggcagacatgccacgtcttccataagcaaggtcgttactacatcgtccatttcaagcagctgttcctgctcgatggtcgaacagatgtaaccgactttaccgatgaagatgaagatcgtctggagttcatcgtaaacttgcttgagcagtggggtttggtcacatcactggttgaagtcgatgccagagttgaatcaaacgtaatgattatcccttatcgcgataagcataagtggagccttcgtgtgaaatactccttgggaaatactgataatggcgagagctaagaaagaagagcaggtcactgacctgggcgcgctggatatgtccagcgtagctgtcatcggacagattgcatcgttcgaagatgacaacgttggcttctatcagaagcgcaacaagaccattcctgattatgcgacagagttctcggcaggctttgacctgagcgttgacattgaagcaggtgacgtgatcaacaagtacgatcatcgtaatcagaagatcgaaatcactgctcgtggacaagacaacgctccggcgcgtctgtacctggagccaggtgatcgtgctctggttccgactggcttgcacgcggatatcccggaaggctactacatcgcgattcatgcgcgtagcggaacttcctggaagcagggtcttattctgacaaatggcgtcgcagtgattgacgcagactacgtgggcgagatcttcatctcggtcaccaacaacagtggcaccagggtagtcctagaagacggtgagcgcattgctcaggggctgctaatgcccgctgtcaaggcacccttcaagaggcttgacactaagccagcacaaaagactagccgcgcaggtggctttggatcaacagggagcaagtaatgagcgatatcaagttggtatggaccactcacggtcagatcctcggtgaagtcaccgccaagggcgatggttacgaagtagagaatccggtattcatttcgccgggtgggcagggtgtcagcatgctgcctgtgaacatgttctccgatgaaacgaagatcactctgacgaaagaggaccttcgcttcggtggtcacctgtttgagccgatcactgagctgcgcaacgcgtatactcagcagttcggatcagggattcagcttctgagctgagtcggctgaaacgccatatctcgccgagatcagcttgctaacacttgctgatccggcgatgacgcctagataggcaagccagataaactcaagtgatgctgccgctggcgcagtgatattgatgaataggaacgcgatggtcgccacaaaacaggcaacgacgttccagaattttgtagatgacacggtcagggtgcccggctcgtagaacatagagctgaggtcaagtttcctgattgccttgaacaagacataagcaatcattagcatgaagactagtgctgcacatgaggcagcaaacaggaagccgttggttccaatggctagccatgctagaaatgaggagagtaaagacataatggcgttctataccttttgcgattcgattggaagtaagatttaccacaggtatgtggacgatgccggaaaacgccatcaagaaattgttacaagttttcctatcgagctatttatcaaaggcaatggagaatacaagtcgctctatggtgaccgtctcagccgcatgacctttgatacgatttcggatgccaaagacttcatcaagaagtacgaaggtactgtgcctgtctttggacagacttcgatgcatcaccagttcatctctcatcgttaccctgagaagattgaattgcagtttgacaagtatcgcgttctcaacttcgatatcgaaacccgattcgacggtaaggacgatgaagatgaggtgttggttcgtaaggtgtttagtcttgaagaagagaccgtcaccgttggttacatgaagactctccaggacgtttgggaagtctatgatccgatcaacgagcgttggtatcctgcatctaaggcacctcagcgcaatccaggtggcttccctgacgcacagaatgcagcatacgagatcacgtcgatctcctgcaaggtgtttggtcgtcctcagaaggtgaccttcggtacgaaggaatatgaggtcaaggataagaatcagatctacaatctgtgtgcagacgagcgcgagcttctgcagcggttcattgactttgttcgtttggtcgacccagatgcaatcactggttggaacattgagtcgttcgacgttccctacatcgtgaatcgctgtcgtgctctgttgggtgagaagctgacaaacaagctgagtccgttccatgctcatactgatcgttgcattcaggactactggattgatgacgacaagactgagaagggatatcgcatcttcggcgtgaccactcttgattacatggacatgtataagggttacaaccctgtcaagagagacagttacgcactggacttcatctctgaggttgagctgaaagagaagaagctggattactctgagtacggcgacctgatggggctgtatcgtcagaactacgaaaagttcattgattacaacgaacgagacgtttacctcgttgagcgacttgatcagaagaagcagttcgttcgacttgtgatcaccaccgtcttgatgaccaagagtcgatatcaggaaaaggatggtaaggtaaagctgtgggacaatctgatctacaatctgctcaaggcagagaacatcgtcattccgccagcagttcagaagcacggtcgtagcatcattggcgcatatgtcaaggagcctgtgcctggcaagtaccgttgggtatcttcgctcgacttgacctcgctgtatccttcgatctgtatgatgttcaacatgagccctgaaactctggttcgtgaagagcaaggtcagcttgattgggttgagcgtctgttgaagggtgaagacctggctgcggattgccgagctcagggttgggcgatggcagcaaacggctcggcgtatcgacaggatgtgatgggcgtcatgccgaagggtatgaagttcgtattcgatactcgtaaggctgagaagaatcgaatgctcgaccttaagcgcgagaaggaagcatatcttgcggctggtggcacggaaggctcggaagagtatctgcgtctcgataacctgattgcagcggcagacgcaactcagggtgcgatgaaggttctggctaactcgggttacggtgcatcggcgaacaagggcttccgttacttcaacgtgagcatcgcggaaggaatcacattgaccggtcagctgggcatccagtacatcggcaacatgatgaacaagtacctcaacaagaagtttggtacggagaaggattatgtgatcacgtccgacaccgactcggcttacatccagttggagaacctgccttcggatccgaagaacattcagaagtcagttgacgagattgacgagttcctcgagaaggagttcacaccgttcatcaatgcagcatatcagaagctctctgatcgacttggcgcaaagaagaacctgcttgatatgaagcgagaagcaatcgcagacgttggcatcttccgaggcaagaagaactatgttctgcgcgtatgggacaacgaacacgttcgttaccatgagccagttctgaagatgaccggtatcgagactgctcgaagcgacaagccgatgatggttcgtaagaagctcgagagtgacctagagatcctcctgacaggaactcaggaacagttgcttacttccattgatagtttcaagaaggagttttataatgctcctattgagaacattgcttcgccgaagggtgtaaaggatctgacgaagtggattggtgacagcggtgaacttttgccgaaggctccatatcacgttcgtgcagcatacgctcacaacaccttgatcattgagaagggtctgcaaaagactgttgagagaatcaagaacggcaacaaggtgaggctgatggcgctcaaggcaattaacccttgccgatgcagcaacatcgcattcaatggcactctgcctgaaggtttcgatcttcacgagtacctcgacaaggacaagcaatggaatgctacgtacatcactcctttgaagtccttcactgaaatcctcggatggaagactgaaaaggtcagctctcttgaaagcctattcggctgaggggtttaagtatgagtgcagctagcgagatgttgaaactgttggccagtttgcagaacgaactggtcatggttgacattgacccggaaatggctgagtttgcggaacacgaaaagattctcgacgtgttccgacagactgtggcgtccattgaacacatctatcccatggtacaggcggtcgaagaagtcctcgactggtctatcactccagctctcttctatcacaaatggaagagagcagctgctcacatgggtgtcgatgacgacattggtgaagaagatatcggtccagacgttcgaggactactcggacgatttagcgacgataatgacgatgaagaagacgaaggagaagaaagttgagtttggttgataaattgatgaagcagtctacgattaaagagactgcatcgctggagaatagcaccttcttccagaaaaaagaactggtgcagacaaagattcccgtcctcaaccttcttcagtcgggtgagcttgatggtggtttcggtcctggtctgaccatctgggcaggtccatccaagcacttcaagaccagctttgtgctgacgaacatgaaggcgttccttgacaagtacaaggatggtgtggttctgttctacgattcggagttcggtactcctcagagttacttctcgtccttcggtattccgctggatcgcgttgttcatactccgattaccaacatcgaggtgctcaagttcgacctgatgcagcagttggatggtctgaaccgtggcgataaggtgttcatcgcgattgactcggttggtaacctggcttccaagaaggaagtagaagacgcccttgaaggcaagtcggttgcagatatgacacgcgcaaaggctttcaagtctctgttccgtatggtcactccggtgttgtccctcaagggtctctgtatgcacgtcgtggctcacacctacgatacgatggagatgtatgcgaagaaggtcgtgtccggtggtacaggtctgatctactcggcagacaacatctatatcgttggtcgtcagcagaacaaggatggtcaggaagtcgttggttacaacttcgttctgaacgttgagaagtctcgctatgtccgagagaagagcaagattccggtcgaggtaacgttcgagaacggtatttcgccttggtctggtctgctcgaccttgcacttgaaaccggtcacgttgtgaagccgtccaacggttggtatcagcaggctggcactgaaaagaagctccgccttgcagatacgaacaatgctgcattctgggttccgatccttaccaagacagactttggtgcaaagctcaaggaacacttccagcttgctcagactgaaatgatcaaggccggaacgatcgattacgaaactggcgaagtgattgaagaataatggttaagaaggttctaccaacaacgacgaactggctctatgctaaggagcctatgctcggagcgccaaccattgcgaacattacgcaatggttgcgtaagaacaagctgacggttgtccaaaaaggtcgtcgtttgacagtgaaccatcgagccaacgtagagcctgtccgcctcgctgacgaaattcagttgaggctggaaggctctcgtcgaatctcaaaccttgctgtgaacgtcaatggtattgctatcgtcgtatcggctagcctgaaaggtaacgctggtgaggacaatgaagaatacttgatgcaccgtgtcaatcgactcgtcggttggctcggtggacctgttgacgtgaccttcaagtcaaagaagaaaacttttgagatcaaaggcgttgtcgaagtctatctgtcaggacgtgatacgtctggacataagaaagccgacgtcgagttttggactaagagcgggaagatgattcctgtatcattgaagcaaggcaacgcttcattcttctcttcggctgactcggagctcaaggaaattgctgaggcttcggtgcgatacgcatttgagaacgccttgaccaattttgaaatggaccctgcaacaaagatcaggaagatcaaccctgaccttgtgattgaacctacagataaggaaaaggaatttgcccttttcggaaatgacatcttgaaaggtaaaggtgctatcattagacagtcattcaccatgaatgatttcttccaagatgtgcccaacaagctgttcattcacgtcgaagacatctggcaagaacttcgtgatgtgccagagattgaacagcctgtaattcagatcagaaacgacaaagatagaaaccgaagccacccactgctcaaaggtctacgtgcgctgacaatcaaacgtgctgtagttcctaagaatgctagatggatcgaccgtgagaaactaaaataatggaactctacgtaaaagaagcccgcgaagactaccttgaagtcatcgacttgaaacacccgcagtaccttttcatcttcgatggcattcatgttgggaccaacaatggcaagctagaggtccttgtaaataaagcgtcggtacagaaatccgacaaagcggaagagtctaaccccgatgcaattgtcgcggatgaagatgaattccttagtacacataccgaactaatcatcaacgaactgttccgtggtccagttgaaacggcacttggttgatattatcatataggaaatcgtaaaggaaagtaacatgcagaaagaaaaaaccaatccagaactcggtcagcgcgttcacaagcacctcgtcagcctcggcattgaaacgccaatcactgagctggtgaatgtcccgagcaaagagaagatcgcgaagatcgaagagttccagcgccagtcgttgctcactctgggtcttgatctgaccgacgactctctgatcgaaactccgaagcgcatcgcaaagatgtacgttgaggaactgttctacggtctggattacaacaacttcccgaagtgcacagaagttgataacaagattgaatacgatgagatggtgattgagcgttgctcggtcaagtctgtctgtgaacatcacctcgtctactttggtactgctcaccgtcccgatctgtcttgctgggtgtcttacatgccaggtgagaaggttctgggtctgtcgaagctgtctcgcatcgtagacttcttcagccgtcgtccacagattcaggaacgcctgactgtgcagattgctgagaccatcaagttcatcactggcacggaagacgttgctgttgtgatgaagggtcagcacttctgcgtactgactcgtggtgttgaggattccgatggcgtgaccatcacctctagcctgagtggttcgttccgtaccgatcctacgctgcgatcggaaatgatgtctttgatcaagggttgatatgagcgagcacctgaaagaacttgaaagagtagccattgaaaggctggttgagtacggtgatcctaagggtgtgtatgttgcgacgagcggcggaaaggattccgtcgtcgtccatcatctagctcgaaaggtgttcggtgatcaggttcatttgattcacacacctaaggtgaccggtttcaacaaggtacatcctgcgactgtagcattcctctatgagcagagtgcgaaatatggtctcaacatcgttccatttgaacgtatgcaggagtatctggataccaacaagctttggatccaaattgacggcactcgccgttccgagtttgatcggaccgatcgcagtgcagacgtcgtagtgaatggtaagttgatcagccgagcggacatgcctgttcatacggttggcggcttgtttggcaatgaatcaattttccctattgtggattggagtgatgatgatgtatgggcatatattggacagcaaggtattgaagtcaccgaggaatatcgtattctcgccacacgttgatgatgaagtgatcgggtgctttgaagcacttgatcgcggtctgatcacagacgttgtctacttctacgatatcaccgaagagagaaagatcgaagctctgaaaactgctgagatgtttggctttacgccgcattttgtaagctctgattggtttgggcttccgaaagagattgataacatcgcatctgatgatacgatcttctgtccgaccattcgagactcacattctcagcacgctgagattagcatcagagcccgaatcatgcgcagaaacactggctgcaagttggtgttctatacggtagacatggattcgttccaggtaccgcttcctccgaaggttcgagcaaagaagaagtctgtccttcaggaactgttcccttcgcagagtgttttgctgacgaatgagaaatatcatctgttcgaaggctatagtgagactgatcactatgaaggcatcgagttcaagattgacgataagcgaaaggtagtgatgaaaggctatcaggttccttcgggccttgaagcgccttgggatgattcaatttcagattctgaatacctcaacatcctgatcactcgatatttcaaccgtaattcggttagttacatcgcatttcacaatggcaataggtgggtagaatttaatggctaagattggtattgaagtagaaggcatgctgcgcggagagaacgttcgcacttatttctgttcggctcgcgagtacgttgagtcagatcttctcaatctcatctacaatctgtatgcgaatagtattgagatgatctacatttcggatcatcacaacgagcttgatctgcatcaccttgcagaagtgttcaatgatagtggcatcggtgtcaccgttgaactgaccgagttgaattcggttccgccagaaggtgttgagatcttctggaatgtttcgcaggcttcttatgctcagtctcgtactttgcatttcctgcgcccaaaggatcagatcaagatcgagaatgagaaacacgttcttgcattcgttgcaggcaatgcggtaatcacttatcctgaggactttaatggagacattgaagtatgagtgaagatttcatgagtggtatgatcgaccagattccggaacaggcaaagcgaaatctgttcatcattccgattgagcctctggaagagcggtacactggcgagtggtacaagttcctgccaccagcctttgccaagcacaatttcaaggtgacccagattgatggcgagactctgaccgactcggttgagactggtgcattcctggatatgaactcgacgatcttctacaaggcatctcagatgcagaagattgctcgcatgttccgtgagaagtctgtgcctcatggttcggtcttctttgtcagtgacttggaattctggggcattgaatcgctgcgcctgatggctcagatcaacaaggtcgagatcaagatctatggcttcctgcatgcggcttcgtacaccactgaagatgcattcgcagttgcggcaccctatcagaagtatactgagctgggctggctgaaagctgtggatggcgtctttgtcggttcgcactatcacaagaaggcggtgatggaacgtcgtgtgaacgcgttcgcgaacgaagctgaccgtcgtgagattgagaagaagatccacgtgagtggcaatccactcttcccgagcgcatatgacacgacttcggttggtccgaagaagaacaagatcgtgatcaccaaccgattcgattctgagaagcgcccggatcagagtttgctggttgcactccttgtcaaggaagcactgcctgatacagagattgttctgacgaccagtcgtccgactttccgatcgaatcagaaatggttggttgacctcgctcgcatgtacgagaaacaaggtctgatcaccatcaaggaaggactgaccaagaaagagtatcacgacgagctcaagactgcgaaggtcatgatctcaaactctatcgaggaaaacttcggttactgcattgtagaggctatcatgtatgacgtggcgcctgtactgactcgaggtctttcgcacgttgaaattgttcagggctttgaccagttcctgttcgacaccaacgacgaagcagtaagtaaggttatcacattcctgcaacgcgatcagcttctcaacgcgaagcacttcttggattcttactttatggctgctgacttcatgggtcagatcatggcccaaggatgatatgacagataactacaacggaaacgaactccactacatcgcaagcggaacgtctttcatgtacatcaactcactccgtcgagatggcggagtgaatgatgaaacgattgattgggtacgcaacatgttcgtaggagcagatcgtggacctaacaaattcggcatgctgttcaacgcgttcactgaatcgaccttcggtaaggtgttcaaggagaactatgctgacgtaatgtgcgacattcacgcagactcaggtggtctgcagatggtgtcgcttggcaaggttgctgacgatgcagctaagcgcaagatctacaagactcaggctgattacagcactgtggcaatgtcgttcgacgaaatccctgtctcgcagatctttgatccgtatgctggacgtggtgcaatgtcggcgacgcgtaagaaggtcttcgatcgctctcagctgaaagctaaggcaattgaatcaggaaagaatctacgtgaacagcttgaatactttgcggaagtcgggacgatcgctaagcctatgcttattgctcaaggcaattgtccagagacctattatgactgggttgagtacgtccaggatcagatccctcatgagctcatggacaatatcgcaggcgttgcagtcgcaacctcgacgcttggtcctggagatctagagaactacgaatcggcgtttgttgcttcgcagatgaatttccgttttgactgcaagcaaatccacttcctgggtgttggttcgtttgatcgtcttgctcctgttctggcactagctaagtcaggcgtctacaagaacaagatcatcagctacgacagcactactcacacaggtgggcttgctcgttcgcgattctacacacgacgtcctgacggcacctacgttggaactcgtctgttgcaatcggatggatatcgcccccgcgattatcagttcatgatggatcacattggcaagttcaacatcggcttcgatgatccggaatcgctctacaagtatttcatcacttgcccgagctattctgccgttgaggcgattggtgagtcgcacaatcgaccattcattccaaagacaaagattgctctgttccgatattcgtacgataacttcatcacacagattgaagagtacatggattcggacggatacatgaagggcattcgtaaggcgcaccagcatcctatcgcaggtcttgctgaatgtcgcactcgttccgacttcaatgtctggcactcgacgttcaagaacgttttgaagtcggacagagttcgatcgaagcagcagagcctcgaagagcttttcggttaaagacatagcatccgttgattcaccgtcacggatgctatatcatagttggaccatttaggagaaccattagatgaaaaagatttgggtaacattccggaaggcaggctttcaccgctacccagcagccggcacccaaggactcgaagacgtcgcgtaccttgcacaccctcaccgccacctgttccacttcaaggtagccattgaggtcttccatgacgatcgtgagatcgagttccaccagttcctcaacttcttggaagaggctgttgcactcaacggtcttgattacaagtcgtgtgagatgattgcagatgatatcgcaaagattgttgctttgaagtatcctgcactctaccgaacccttgaggtcgaagtttcggaagatggcgagtgcggtgttcatgcaatctatggcatcagcaatggcgaggtattcggctaatggcactgttcgaagtatcggaaatcttcagctcgttggaaggtgaggcacaattcaccttccatccgactacctacattcgttttgcacgatgcaacttctcttgtccgttgttcaacaaccctgagaagatgattgatgcaaagggctacgcgcctctcgattttgatccgaaggactatcaacgtctggaagatatcccgctgattcacaaaggctgcgatagtcagtatgcagtcaatccgatcttcgcgcacatgtggaagaagtacgacacggacgcattgattgatgctctgttcgaggttcttcctcagggtaagctcatctacagcactggtctacctcagatcatctctttgactggaggtgagcctactttgaagtggaagttcatccctgagattctgttccatcctcgaatgaaagatgcacgtcactatcttgttgagacgaactgctctgttccgttcaaggacgaattcatcagcaacatctacgagtggcttgcacaagactcgcgccgcatttggacatggagcaattctccaaagatctcgtccagtggtgaggatcgtaagcaagcgattcgccctgagattgctcttatgcagcacgttctcactcacaacttccccggtcgtgtcaatcagtatttcaagttcgtcgttgacggctctgaggctgattacgctgaggtgaaggaagtgatggagatctactacgctgctggtctgcctcgaactgttccgatctggatcatgcctcaggcttgcactgacgaacagcagaaggttacggcgcgcagcattgctaagcgatgcattgatgaaggttggttgtactcgcaccgtgtgcagaatgatctgtggggaaatggcgttggcacctaagatgctaacgtatcacgaatggatggttgcccacaaatactggggcaactatcacgccgagtacggcaaatactgtgctaagtggagaagagataatgaagatcagaatcgaatggacaagcgatagcagtgattgcgaaacctgtggttgtaactttgccgacggtgcgaacgtctacattgatgaagtccttgcactagagttcattcctattgctcactgctacgacggagacgatttcactcgtgattacgtgtatgcgcaaattcttaagcatcttgggcatgaggtcatcgagggatgaacgagattccgatctcagctgcacagcacgtagcgaagaagtatggtttcgaccagatcataattattggacgtaaggtcggctcccacgagcacgtcacgacttacggcgttgacaaagagaactgcgacgcagcagctcttgcaggtgatcatttgaaatacaacgtgatgggttggccaagaccatgaacgatgagaatcgttggactgtgtctggcaactggtatcattggaagtggcggcgcctagcgttcgccccgacctgttgggacaaaggcatcggagattccgatggcgagtggttctacattggtatgggcttctacttcctcatcgtcgacctaagacaaggaggattactatgaaactatttcgtaagagctatgatggcggcggtgattccggcgtcacaggctattggttgattgagtgcaagtctttgttctcaatcgtattgcttcactttgaaggcaagagtcgcgaggcattccattctcacgcatttaatgctctgacttggtggctcaagggagccgtaaccgaggagatgaaggatggtcgaatcagaacttggtggccttcttggaaaccaaagtggacgccgaagaactgcttccacaagattcatgctgatcctaaaggcgcctgggcactaagcattcgtggtccatgggatgcaacctggtttgaatctaagaacggtgaaacctatgaattaggtcatggtcgtgtcagaattaatggtctagttgagcaggattccgaatgagtgaagtaacaaatgagcgccttgttctctcggcgctggtaaagaatgaagagtacatgcgcaagattcttcccttcgtaaaggaagaatactttgaggacgagtcggagaagcgcgtcttcaagatgatcaatgcctatgcaggcaagtacaatgagatgcccgacaaatcgactctgatggtcgaggcaaagaacgatcgcagtcttgatgaaggtcgtagtgctcgagtaattgaaacagtcgcagacgttttcagcatcatccctagccagaacttcgattggttgaagcagattacggaaacctggtgtcaggaacgcgcagtttacaatgctctgcaggaaggcatcgcagtctatcagggcgagaacacaaagctctcgattgcagcgattccagacatccttgcaaaggcgatcagtgtcacgttcaacacacaggttggacaagactactttgatgacgctcagcttcgatgggacttctacaccaatcctgagtcgaaggttccgttccgaattgatacgttcaatgagatcacttcgggtggtctgactcgcaagactctgaacctgtttgttgcaggtaccaacgttggtaagtctctggcactggtcagcctggctgcggattacattcgcgatggcctgaacgtgctctatgtgtcttgcgaaatgcgagaggaagttgtgttccagcgagtggacgcgaacatcctcggcatggatatgaacaagatcactgacattggtcaggagaagttcctcaatcgcatcgagtctctgaaatcgaagtcgtacggcaagctgaaagtcaaggagttcccaccgacctcagcatcaacgttgaacattcgacagacgctcgacgaactgaagatgaagcaaaacttcattccagacgtcatcattgttgactacctgcagattctcgcatcgtatcgtcttgcttattcggttggctcctactacttcttcaagtcggttgcagaagagcttcgcgctctggctgttgagaccaacaccgttgtgtggtcggctgcgcagtttaaccgtggtcagatgaacgcgacggacgttgacatgagcggtatcgcagagtcggcaggtatcgctcatacggctgacggtatgtgggcaatgatcagaacggatgaactggatcaggtgaatcagcttttgatcaagcagctgaaatctcgatacgcgaacaagtcgatcaagaccacgttcacaatcggtgtcaagatcgagcatcagacactctatggactggacgatgacaggtcaggtgagttcactcaaatggactcgaagattgtcacagaccagaactcgctgaaggacaagttccaaagcgctaatggtggaagcaaattccaaggatttgaagtgtgaaagacgtgtggccagaactagtcaaggaatacgagcctctcattggggctctgtatcgctgtaatgaacacacctacaccttcttcggattggtgcacggtggtgacgactattactatggcatgtggcaacatggaacaggcaagtgtgagctcttgtcctgtgtcggtgcgcccgaatccttcggatacttccgaacacgaaacgcgacgagacacaaccgagtcggctacgctgaaatctgagccgaccgcagtcctatgtccgccagactggcccagcttttaaaagcgtatccagtaagttcctgattctgttgatattcttgacgggaagccctgctcagaaccaccaatagaatcagacacttacaagcctagtactgctaaggggtgtgccaggctcgagccagatgaccactcaaggtgacaccccggtttcccagggtgtcgagtggcctgcattgtcagatgtcagtccactatcagaagcccttgatcagggtcgtgtccgccatgtccttccagtcagcggcagaggtcttcatgaaaccggcgagctggttcaccgtacggatcgagaccgaccgcaggctcatcaagttgtcgttcatccacttgacgcactgatcaacctgcttctgatccagaccgaggtctgcacccagggtcgattccttgaggacctgctcgacacgaaccatgatggccttcgggttatggatgcacaggtccaggaagatcgaccgactcatgagagccagaatgtgcggagccagtcgaccttgcttggcgacgatgcgatccaggtcgaggttggtgatgaagacgatctgaccttcgtactggaatcggttcgggatatcgctgtctgcgaggtacttcgatgccttcgaccagctgatggtccgaaccgcactcgtatccagcgccgccttcagaatgttcagtgcttcttcgtcgtagaacacgcgatccacgtcgtcgagcagcagcacctggcccttacctcggttcttatagagcgtctcgtagagaccgacggcgctgatcgtgcccttggtcgagtcgtaggacttgatcttcttggtgcgctctgcttcttccaactggcgctccaaagtgaaggtcttaccgacacctgccgaacccgacacgatcaacgaacgaatgttgccgttgaccatgccctgcccgagcttctcgagcatgttgaatcgcttgcggatcatcgcagcatcaacgggcttctcaggaacctcgacggcgctgtcatcgtcatcgtcgtcatccgaagcagttgcctgagccaagccggctgctgtaattgcccaaagaccacgaccgatcttttccagctcgccctctttagcgcgcttcaaatactctcggttgaactgaccaagttgacccgtcgtaacggtgtcaccaaacttcattctcagttctttcttcatcgtagcggtggtgctcatgatccagttccttaaagtggttttgcctgacatctgacaaccacaattatacggatttcttccccaggaacaacctacgtaagtgtctgattctgttggaaaagccaaagctaccaaggattcttcggtacacaatcgaaggattctgtgccgttctggctcgatccactagaattggacgacataaaagtgaggcaattcgtcatgggtggcaatgcagttttcaatgatctttcggctcagccggtctctatcgtctgtcaagacagcagggatttctggagagcaaaaattgagcatctcatgctcacaatcaaccacgtcgcacgtcgaaccctctgggatatgagtgcaggcgccaagccttatcttgcaggctcaaccaagttcatcttcgatgacttcatccctacagctgagcttgtcaagtacaagaattccttcggtgacattgacattcaaattgatgttgagaagggagccgacttgatgtctgtcctcaatctgattagcgcaaacgaatgtgcaaatgagttccagattgtcgggtggcagcacacagtagacacaatcgtgaccatgtggtacgatgaagatgtgcagcagacgttccaagttgattttgagctcgtcgaattcgccaacaatcgcccgacgaactggtcgaggttcagtcgatcgagttcctgggaagacacctgcgccggaatcaagggtttcgctcacaagtatatcttccgggcgatcactgctatctggcttcgtgaagcgcaggtccagctcaagacaaagttcgtcacaaaaaatatcagccctatcgtgttcagtccgaagggtgctcgagtgaagtggcgagagattcgtccggacgtctggcaagagattcctatggacgaggaagctctaatcaagaacgtcgaagacctgttcaagctattctttaaggtcaagccagatgccgagtcaacctgtgagatgtattcttatcagggcgtcgtcaatctgatcctcacctggattgacaaggaagatcatcttaagatcgccgcaggtatgcgcaatcttctttggggtccgtatgctcagaagctgtaccgagacaatcctgcacgagacttctatgaaaagggtcaggcttatttgtatctgacagagactctgggaatcccggtcgagcccttcttcggatcggagaaatactatgagacgtattgatggcgttcttcaagacgattgatttcctcaaaagaaacaacgcggctattctaatcaacatcgtcttggcaaaggacgtcatgacgattggtaagaaggtcgacggtgaaagagttgtggttgaggctttgatgctcggagacaagccatccgagagtgaggaagagcttactcaatactgtctcactgtgaaaggttcacctccggcactctgggcactcgacaattggttccctgtgacacggttcttcaaagatcccaggttcgttccaaagtcaaccatcaagggaacacctgaggtacgcgataaggagttccagcagaggcaagagaagtcattagttgacgtcatcaacaagtggagtcaaccgatcaagctggaaaacttccacatcaaacgagccgaacaggctcctgagattggaccacacggaaaagagaacctagttgatgtcgtggtatgggacgaacacaatttttcgtataatgtgagttgtaagatgtctaaggcagctgaccttggctccggtggcattgctggattgcagaagtcggttcctgagttggtgaccaaactctactatcaagtcaagattgatctgtatgagttaggtttcgaggaagggaaggtgtacgatattcgtaacatcccgactgtgatgtacggtattccggacatctacgcgtacaagatgttcgccggatcagatgaggttggtggcaagattgatttcatctacgttggacccgatcaggttgactacaatggtgaggagttcaacggcaaattctggccagtggaagagtatgctaagaagaagccatactacctgcggctgagaaagagagacgttcatgcgaacatggttcgcatcaacttcactaagctcaactcacacggacttccttgcattttcacaacaggattgggcgactttgcagcagcccgtttcgtaattgatgatagagtgccacctaaggcaactgtgaggcaactatgctagtagcagagaagaagcggaagaacatgaagcacttccgagaaatgaatgatagagtgttctgtgaatggatccttggctatgaagtcgatcagcttgatctaagttggaagctcgacggattcttcctcaggttcggaaaggacaaagagaacaaaccttggttccagactgcacgctcgcctgtgctctatgatccgatggagatcatctggcactcgcttgagaaaggctatgatcacactggcatgagccgtgctgaggtctacttccatctcatcaagaccatctgggattcgaacatcatgaatcacttgccagaagactctgggttcgagtgtgaagtgttcgacaagtcgatgtctgtcttgaacaaggagaacaacaccagaacgttcgtgaacattccgtacgacgaagagttctttaagacagatctcacgttggctatctacaagctcattgaggcagcaacagctgagacatggattgatgggtactactgtgatctgaatctagacgacaacatccagacatttggcactcgtttcaagattgacttcaccgcgaaatactactttgagtgtggtgtcaaaggcatcacaggcaacggaaagcttcttcctattctggaatctcgccgccaggcagatagagaaaccaaacttggaatgaaggcagtgatcgcaacactcaaagatcaattctgttactatgtcttgaagcaggctcaagattatcacaagatgggaaagaatttcgaaggggttgtcatcaccgtaaataagacagagtataaaattgtcacagactacttccgagacttgatctacttcaagggagtgatgggtggctaattttgacttgttcttcggaaggttccagccggttcacagtggacatcttgctgttctcgagaggatgaacaaccctgttgtcgtcatcgtcaaaggaaaggtgtcatcgaaggacacggagaagaaccctttcgacttcgcctatcagaagatgcttctagagaaggtgaagcctgatgttagggtgttccagtcagagactggatatctcccggacattatcaagatgcttggtgattgtcctgatgctgtctactgcggttccgatcgcattggacagtacaaggcgcagatggaacgcgccaacaaagagcttgatgagccgtgtctcgtcaggttcattgaaacggagcgtgtgacatctgcttccgttgttcgtgaggccatccggtctggcgatagaaaagcctttaaggccaatgtccctagagcaatctgggatcagtactcaacaatgaaaaagaggttagaaaatggttgacttgacagtaactattccgtcgttcgaagacttcctggcagaagatgcaaaggcaatctcggatgcaaatcatcacaggaagaatggcgacggcgaaggctgcgacttgaagcctgttgtttcggacaagggctcgaccactccagaagtgattgagaagtcggacaatgctgcacctggcgacgacaatggcgaaactctgcctaagccaccggtgagctaagatgagcgaaggcgccaacgtaactgcaggtgtggcgaatccagacaacgtcatgccacccgagaagccacagaagcggaagggagaaggagagttcgcaaaggaaatcaatgcggctgtctcacaggctggtaagaagctggtagagtctctgttggaagcgaaggcgcctaagcaatttggcttgggcgacaaagtaaaactcaacggcaagcctggacgaatcacttcggttgtcagcacgacagctgaagatggcaatccagggactcactggaaggtatctatcaagtacgaagatggcaaggaaaagacttacatgtctaaccgcgccaagatcgttgtggtagagaagcaccctcagtacaacaagcaagcagaatggcatcaaaaggatgctatggcagctaagcgtggtgcagactacactcgtcaccactctgagatggccaagtaccatgataccatggtcaagcatcacgactacgaaggcaacactgaagaagcagacaagcaccgcgaagcagctgtgacgcatcgtgctgaatctgagaagcgtgctaaggaagccgcagcaggcggaggctttgtaaccaagcgtgagatgcagtccaagcaacagcaagcctatcgcaaccatgtagctgacgaacgcgaaaagaagcggcagtgggaagaagctcgtaagacagctgcggctaatcgcaagtcctacaagcactactactctgttcctttcgctgacaaggatgaagctaagtcgaagggattcaagtgggatccaaacgagaagaagtggtacgttacttctcaattcccgaagccaggcacaatgaagtggaaggcttcgcactccgtcgatgaaaagacaggaaagaaagtagatgactgatttcgatacatggttgtacgaagatctgaaagttcccaacgccaaggatggcaaagggaaaatgcgtcatggtatgccccagcttacgcaatttgatgcgttcatggcagacctaaaagacaacgacattgagacagaggtcaagtcgttgagtccatggaagttgaagcctacacagagcaacttcaatgaggagaaggttgactacctgatctccagtgctaaatgggaagcgaagcctataattacaagtgccgacaactatgtcgtagatgggcatcatcgctggttggcggcagcaaagttcgggaagaagattcaatcaagagtcattggcatggagtgcgatgacctgttgaagttcctcaagggcaaatcctatgttgaaacaaagacaattaacgagtgatatgaatggcgcttcgaacccctgcaccaattagattttctctggagattccagagctaaacaagacgatctcctatcgtgcccttaaggtcggtgagcagaagtctctgttgactgttcttgagctgaaggatgcttcggcgatcatcaacacgattgtagacatcattgatggcattacgtttggcgagcttgatcttgctaagacgcctatgcatctcattgatttcatcttcctgcacgcatacatcaagtcgtcaggtgctcgctcaaaggctgagtacacctgtggtggcgagatcgaagtagaagaggaagtcgagatcgaggaaggcaagaaggaaattgtcaccaagactgttccttgtggatccaggcacgaactgctcctcaatctcgagaatgccacgattaaatatccagaaggatataaggcttctaagctggtacagatcgatgactcgatgtctatcaaactgaagatgcctgacttcgccagcttcaagaagctcgacctagacgcagacgtcattggtatctcagaccagtacatcttctctggcattgagtacattcttgatggcgagaacatgtctgtcccgggtgcggatttcgacttcgatgaaatgacgacttggctcaacgaactgccttccacggcgcttgatcagatcacggaattcttcgaaggcgttcctgtcctgtcccttaatgtggacgtgacttgccctaagtgcggcaggaaggatggtttcgagcttcaagggctcgacgattttttcctgtaatctatccagctaacaagctagtagacatgctagaactgaggcacctactagtaacagaacacggatatcgtctagatgaactggatgatatgcctttgttcgagattgaaatgacctctttgattgcagttgaaacccagaaaagaaagatgaatcaattaggttaaggtaaaatgcttccagcacttctaagaacagttggttcttcattgttgagatcagaggcggttagtgcaggtgctaaccgccttgtcgtcgcttcgagactcaacaaggtcgcaggtaacaagctagtccaaggacttgcgaaacactctggagcttccaaagttccggcgctggacaagattggtagttatcttagcaaggttccttcaggaaaagagaaggaaaagaaagaacgtggtacatccacttcttcatcttctaagaaccgtgataaggcccgtgatgatgctgccaagaatcaagagcgtcaagacaaggctgagaaggaatccctaggtgtacaggaagagaatgcaagccttctaaaggtcattgcaaaggacactgtacgcgtccgtgatgcggtcgaggccctggctaagaacggtgtcggtggaggcgcgggcggtgatggaatgatggacaagctgctcaagaccatcacttctctaccagcactgctcccttctcttctcactggtcctgcgggcaaacttggcggctttgtaaccaagtttgcatctaagattcctggcgttggaagactcatggggtcaatcggaggcatgggtaaggcaggcgaagctgcaacgactgtagctcgtgcgggtgtagctgcggaagcaactgcggcaagagcaggagccgctgctgttggacgtcatgctctccgtgatcccaagacaggtcgattcattgcacgtagcgcagtacaagccgctgaggttgctccaaagggcattctggctaaggctggtgcagctgctgcgggtgttggtggtgcaaagattgcaggtaaggcaacaggcgcgattggtaagggcatcgcaaagacggcaggtaagtctctgctcaagaagattcctatcattggtgcaatcgcaggtcttggtctggcagcaaaccgagcatacgcgggtgactggacaggtgcaggactcgaagcagcttctggtcttgcaggaactattcctggtattggtacagctgcaagtcttgggcttgacgcggctatccttgcgcgagaccttaagaatgacggaagttcgacacctgctgtaaccgcagcagccaagccagttactgcatccaagcctccggtgcacacggctgcaattgcagctgctccagtggtagcgcaacgcaaaaccgcggcagcgactgactccatgcaggtcactatggcgaagatgcttgatgtgatgactgaccgctccaagggcatctacatcgttcctgctgaggttggagcatccactcttcagactcgctcgccttataaccctcagggtgttccaacaggaaacaaatacgagccaatcgtcagtgcaagtccatatgattcagcaccaagcagcatcggtcccgctacggcaggtcgtacaatgggtgagggaacatccgtaacctccggtcagacaatgcgaggcggtcgtgttgagattggtccaacaggaaactttgaacgagatcttctgaatcagattgcagcaggtgaggcaggtaaggaaggctacgactcggtatggagtggttctcgtgtcaagccaaccaagcctgtgtctcagatgacattcggcgaagtgatgcagtggcagcgtgatacgctcaacgaacaaaagagccgaggcatcccagcaaatcgtcgtagttctgcagtaggacgttaccagttcatcagtggtacactcaaggcacagatggctgcggcaggatttaaggaagatgatctgttcaatactgagaatcaggataagctcgctcttactctgatgaaccagggtggcaaccttgacaagttcaagtcgggtagaatctcagcggagaagttccaagattacattgcatcacagtgggcatcacaaaagactgcaagcggagcaggcatgtataatgctgcaggcttcaaccatgcaggtcacagctcacttggattcttgaaggcagctcaagcgtcaggttctctgacggcatcctcaggttccccaactgcaatggtaagagatgctgcacagcagaagcaagccgcacgtatggcgccaatcgttgtcagcgctcctacacaggtcgttcaaaacgggcaaaaggaagccgctgctccaagaacaacggcttcggcaacacctgtcattgtgcgtaatccggactcgccggttcgctcctacgtactatcgcaaatcaggacttcttgagcttcttcttgagctcttgaatctcatcgtagtacttctgagactgggacgtcaattcggcgttccagactttgcattggttgagtcggtcaagatagagttgagactctcctgcgaaactccaaagaaattggctagtttgtggagaaagtagttctcctgtgttggtgttggatccgttactgccgccggtgcttccttgaccaccggtggatccggaattaccacttgctgatgggtcgcgcaggcggataccagcaagcttagacacagcagcatcgagagaagcagtgcgcgccacataggctttgtcgagttcattctttttgtccttgagactggtttcaaatgtcaatttgagattagcagatgcgccttcagccgtagccaccttggtcgccatttcggcaacctcggctttgtgcgtagcttgaatggcatcaatttgtagacccttgacataccagattgagcctgcgccaccacctacacccagtacgagtgcgatgccgatgccccaaaggaatgtctgggtattcaatgcgagtttgcttagcattataggtgccccagattgtaacgattagtgacgtcctttaggatatcgacaacaattcgatttggccagacgtcggcgccaatcgaccaatcatattgatgcaagaacatgagaatagcttttgcgacactgaattgaacatcattcaggagcactcgacagatagctgttaccttctttggtccaaagacatttaaagtgacaaccatattattgatcagcaacttctcattgatttgaccggtctttagaaaccggtcaatcatcttccttgtagtcatgaagacagcaaagtctttgtcaaaagtcttggcatggaagacgcctttaccataaccaccaagggcgatctctttcgccaagtctttcacatcactcatctggggaccttactcggcagccttcttgttgttcttcttgctggtctttgatgttgtcttagcagccttaggcttggtctcttcgacttccttggcaacttcctcgaccgacttggtctcttccttgattgcctgaccctgctcttcgctgataatagcaatggcttcaacttcaccagcatcatctagctttgcgatagcaccaatcggagcatcttcaaggacagcttcgattacatcaacagcttcttccttggcaaaatcgccagtctctacagaaaatgcatctgccttgatagcagcaatctcatcttcgcttagttcacggctccctgccggcgcgatcatatcctgcaaatcttcaagagaatgcgtgcgctttgaccaaaccactgcgtcgggcaatccacgaatcgacacgacgagctcgccggtgcttgggttgacccatccgaggtgagtagcaactgcacccttcacgacttctttagttctatctaccatcttgtttcacctttaattggacgaatgcacgacatcgcattaaaatagatcacatgaactatctagatttgaaatacacgaggctcgtgtcaagttatttacctgggtggaaggaggtaagtgcaaccttgtctcgttttcgttgcccgttctgcggcgactcgcagaagtcggaatcgaagactcgtggatacttctatcagattgaaggcaatgcgaatttcaagtgtcacaactgtggcgcttcgatgggattgtattctttcctgaaagaggtagcaccggtactggcgaaagagtacacctttgagaaattcaagggagtcaaggcgttcgagactgatccttttgagaagttcatctcgaagccaaagtttgcagacaagactctcttggatgattgtcaggctatctcaactctggaggatgaccataaagcaaaagactacatcaagggtagattgattccggaaaagttcttcggtgatctctactactgcaaagatattcgtttgattgcggacaggcttgatgactatcgagaccgagaactgcctcgtagtgattgcatcatcattccgttctacaatgaagcgaaggaactggtctacatgcaggctcgtttctttggtgacgtttcgatcaggtacattacactccagattgatccgaacgcaaagaagctgtggggccttgacagggtagattggagcaagaaggtctacgtctgtgaaggaccgttcgacgcgatgtttgttaagaactgtatcgcagtcgcaggcgcaagtatcatgtctgaaattaaatacctgcgagaacatgctaaaaaagaccttgtcttgatcttcgacaaagactatcagacaaatccagaggtgtatgggcaattcctcaaagcggtcaatcaaggcatcaaggtcatcatgttcgatccgcagttcgctgctaaagacatcaacgcccaggtacaacatggaacaagtattccagacctacagaaatatcttgagaaacggactttctctgggctcggtgccaagctcgagcttacgaaagttagacgtccactcaagagaaaataatggcacgtaaacctcacaagtcgccaaagacatcgcagcatgatccactcttcgacaacttcaacctcgaagcaaagggatcaggtactcaagccgaagcacgccttgactgggaggcaggaaagaatcttgtcctgaccggttatgcaggcacaggtaagacgtatcttgcgctcgccctagcactccaggccatgatggcaggagaggtccgacacattcacatcgtccgctccgcagtttcttcgcgagacattggtcaccttcctggtaccgaagcacagaaactcgaagtctacgaaagagctatcaagtcaaacttcaacaagatcttgaagcgtgctgatgcctacgaatgtctcaagctgaagggcgccgttagttttggatctacttcctttgaaaggggtgtgacatatgacaaaacctgtatcattgtagatgagtttcagaacgcctcattcgcagaacttgatacggtagtaacgcgtctaggtaatgactccagaatcatcttctgtggtgacactcgacagacagatttgtctcctggtaagagtggattccataggtttgttcgaatcgcagatgcttgcggaaagttcttcattcgccatgagtttggcatcgaagacatcgtaagaagcggtttggtcaaggcatggatcatcgcagccgaagatgatgcaatcaagaacaacccaacctgagaaatgaaatgattatcactgatgatgtaatgacctcgctgtccgataccgatctgtctgaaggcactacgagcgcagcgaacctgtatgctcaggcgctgtatcgtgatctggttcgtcaggcactcgctcgtaagagtaagcacaatactgctcgcgccctccgtggtcgtgctcgtattgccaagcgcaaggctaagcggaagtcgtaacatatgagcagcaagaaccgtcgtgacgaaaccaacgtcgaccacttcgcttctagtaaagaccgccgtgccgagaggaggtcgaaagatctcctccggcgggcgcatgatgtggatgaagactgggacgagtatgaactagactctcgcgagattcaccgcaaacgaaatcaacgaatggattaatcatgatcgttattgatatgtcgaacctcgtgttctcacaggttctcgacttccatcttaagaccaaagaacaggttgacatgcccgtcgtgcgcaatctgtgtatcgacaagatgaagtcgcacaaagcaaaactcggtaaggagttcggaccggagattgttctggcatttgactctaagcattattggcgtaaagacatcttcccttactacaagggtaagcgaaagaagggtcgtgacgaatccacatttgattggaaatcgttcttcccaatgtatgatcagttcaagcaagagcttcgtgattacttccctgtgaagtgtctggaagttgaaggcgctgaggctgacgacttgatgggtgtcctcggtcctcgttacgctccgcacactccggtctgcctggtaacgtctgacggcgatatgatccagttgcagcatcagaactcgaacatcaagcagtggtcgccttggcacaagaagttcctcactccgaagaatgctgagtatgatctgtttgagcatatctgtcagggcgacgcaggtgacggtgtaccgaacattcttagcgatgacgacaccttcatggctgatccgaagaagcgccagaagcctcttcgcaaagaccgactcgcagagtggaagaagcacggcatcaccaatccagaatacttctgtccagattcggcagcgcttgatcgcttccaccgaaataggaagttgatcgaccttcggtgtattcctgctgacttaaccactaaaattgttgaatcctatgaggcggctgtgcctgcaacaggcaagatgttcggttacctcactacgatgaaactcacaaagatccttaaggaaggcggcttctaagatgccaatgtacgacttcaaatgtaagacgtgtgatcatgttcaaactgagatcatgtctattgcccggatggaatcaggcgaagaagccgtatgcaaagagtgcggcgaggtgtctgcaaagaccttcaccgcaaccaattgggaagctgcatcggctgagtcacttggtcggaagaaggctcctgaggacttccgaaacttcttgacacagattaagaaggcacatccaggtagtactatcaaagatcattaatcatggctaagtctgtggcaagtttgatgggtggcggtccttcaccccaagtaagacaacaccttgaaaagttcatggccaagaatcagtccgagactgataggtttattcatacatacacgtcactcctagatggtatgtatgatatcaaggagacgatcaagtctacgtcttacagtgaacctgaggaagtgaagttcatcacaggtaaagtcaagcaactccctgaccccgatgtgaactggggcttctcaactattggtgattcactttatgactgatctcattcaactgcgaaagctcgtcgcagaatacaaggctgatcacaagccgctcgaacgataccctggtgtaactcgtgtcctcagtggcaccaaagacatgacagggcttgatgcatggcgtgatcgaattggtcatgaagaggctgatcgaatcgttgccgagtccaagatgattggttcctcactcgataagatcttcaacgattcgcttgagtcggtcatcaatcaggtaccatttgaagaatccctttatgagaacgaggcaggctataaactgtttggacagttgaagccctacttgaagagaaccgagccggtagctgtccagcttaaggtctggtctgatcacatgaagatgatgggttacctggattgcctgggtctttatgatggtgtccttactctgattgattgtaagaactccaagaaggaaaagcgagaggaatacctcgaggactactacctccagtgtactgcctattcgatgatgctgtatgatatgcttggcctaaagatcaagcagatggcacttttcattgctcgacgcgactcgccattcccgcagatcgtcatcagagacatcaagccgtttgtaccgatggtgttgggtcgagtaagaaattactatgggaaccttgcacaatgaaaatcaaaggcactaagatcgaaacagtcgatgttgatatcgatcctttggaagtgatcaggacttgctacaaaaggtggaagagtactactcctggcgagttcatcaggaatggtaattggtatgtcgaggtgcacacctcacattcgtatgatgaattggttggtccagtgtctgatcaagacatggaaatctacaaggcattccagatcgtctcagaattaatctcaggaatgaaatgaattacagtgaaaagatcctcgaggaactgacgctaagagcaaggcgggacaacatcggcttgttcgaggcagcatcagactactgcgaggaacatgatttggaacaagccgagttcgttgaaacactcgaccctatcatcatccaacgtctcaaagaagacgcagcccgtgaacgtaaagtcagaagatgcgtgcagaaaccgtccaaaactcttttctgagtgcaccactcagaacattccaagattatgtcgggctcaagctacacttcaacggtgacctagtatggaagcgccacatggtgctttcacttcgtgaggagcagctgctcaaacgaaaggacgcatactatttcatccagttggctgagcagcatgatcgcgaaaagatcatccaaatgatgatctcgatgttcaagcgaaagcgtgactcttggattggtgagattctcgaggaagagaacgtcgagtatcacaagaagcggatggctgtaatcaactcgttgaagtacgttattcgtaccgacattgaacgcatcgtgttgttcatggaggacaataagatagatgttcgtaaactccttttgtcggacggtcaaagtccgtatattgtatcacaccagtcggacattattggtggtgtgaccgacgagacactcgccctgttagagagggcgttcaagttttgctcacaggacacgttggaccctctttgggaagagcgcaagttcatgctgggtaaatacagtagctggattgaggtggacggagacttcctgaaacaacaactcaaccggctagtagaggcgaagtaagtccataagagacagtaagacctcaattcaaatagagaaaacggagactaaagatgtcatttgcagcacttaagaagcagcgtggtaatttcgccgacctcagcaagaagcttgctgatgaaaagaagggcggtggtggtaacggtccagatgagcgctattggaagctcacgaccgacgaagctggtaatggttacgccgtgatccgattcctcactgcaccagtgaacgaggaatacccattcgtcaagatgtactctcacgcgttcaagaacgatcgtaccggtaagtggtacatcgagaactgccgctcgaccatcaatgaagccgacccggttatggaagtcaattccgaactgtggaactcgggcattgaggcgaacaaggatctcgctcgtaagcagaagcgcaatctgaagtacatctcgaacattctggtcatcaaggactcgaagaacccgcagaacgaaggcaaggtcttcctgttcgcatacggttcgaagatcttcgagatgatcgaagctgctctgcagccgaagttcgaggacgagaagccgttcaatccgttcgacttctgggatggtgctgacttcaacctgaaggcatacaacggttccaacaagcagcgttcgtacgataagtcgggcttctcggcaccggcacctctgttcggaggcgacgacgcagcactggaaaccctgtggaacaagcagtacagcctgcaggcagaagttgctcctgagaagttcaagtcgtacgatcagctcaagacccgtctacaggcggttctgggcaacgctccaggtggacgtcctgcatcgcaggcaacgagccaggcacaggctgtggaacgtgaattcgcagaaccggcacgtccggcaactcgtcaggagccagcagcatcggcaagtgacaacgaggacctgtcgcagtatgcagcgctcctggaaggcttcgacagttaaggtcgaaaccatagtttgattaaataaaggaacggcgcaggtcgttcctttatttttagctgacaagaatatgatcctacaagagaacagcttttattcagaccaatctggtctcgctacgttgctcacaaacaagcaactcgtagccgatattttctatatcaacttcctcgggtttgctggactccttaagatcaaggacgctcctgcgctgatgacctatgtcaagggtttgggtaagctccagctttccaacatgacagacaccaatgctgattggagcctggctatcaagctggcacatgatgcaggtatcatcaacatggtcgctgccaacatggcaacgaagttccttgcactggtcaagagcggaaagattcgctcagctgaccttaaggacgatccaatccgagatatcatcaaggcttgccgtgtaatcagcaacaagccttcaccccgtatctatcaggctgttcaagactttgttgatgcaaaggaccagctagagacgacaaccgtcaagctctggaagctgtctgcacgtccagagctaatgaccgcggctaaggaattccgtgaacagatcaccctgggtggctattcgtccgcattcctgaaacaccagtgggcaaatggaactgcaacgacgcctgctccagctgtagctgttcagcagccaccagcaaagggccagcgtggttcgttgccacctcagggtgctgcacatggttccgactcggattacatggctgctcttctccatgtgttcaagctcaaaggtggtattcacagctacctggaacgtttcggcttcaagggtcactttgacgttgatcgtttcaagaaggctgtcgcatctcctgagttcgttctatctcatggctatcacgtgccttgggagcagcatccgtttgtccagtggattcgtaagaaggatccttcggcttcggcagctgtgctcaagatcctcaatgacaaggatcgtcagacaggtgcaatcgctgtagcaactcaggtatcgaatactgcacctcaggcacctaagccagctgctgtaatccagactgtcgttgcaaatcgccaagagccgattgtgactaatgagtctatctctgagatgtacctcaacggttttgatcctaagcttcatgcgttgatgatgaagtatcattggcctaagggcgaagaagcgaacatcatcaagtcgaatcttcctaaggttctgagcgccctcaagacattcgaggttgatgagcttaagaagcctcatggtcgaattgaacagagcgaatatacgcagagcacctttgcgcgtatgcttcttggtaacggcgtgatgccatcccagatcaacggacctatctacaacactctgttgaagtcgggcgagagaaaggacgctgatgctgtattcaatcttctgatcgattacaacaacgcatccactttgaggcagaacgcgtttggtggcgacttcggtaatgacccagttacgactgcggtgtcccgcctgtttgatggagatggtgttgatttcattcttgatcacctgacacagatcaacagcgcaggattccagccaatcgtctatgatgcaggtaagcatctttggatcggaaacgatgccgaaacagagatgatccgtaacctgatccaatgcttgatgttgcctacgtcaaccctggacggaattgttcgcaacatcgaggcaacgtttgctcgtcttgatatcagaactggtcgaaccatcggaaagaaccttgcagttgacaaggaatccttcgataacaaggcgtctgcaaaggtcaagaagctcgttgacgcagtgaacaagattggtttcgtcgatattgccttgaagaaattcgaaggtgatacgatggagatcctcgacctcctgacagtagctaagaaggtcacgcagggtgcttcctatgcaatgtctgatcactttgtttctctgttgggcgatgcaatggctggcaagtttgatatcacgccagtgatcaaggacgaggaagacctgttccttatcttcaaggcattgcagcaagcagcattctacatgaatgcaacatcccgtgctacggctggaactatcatgccttggctgtatgagaagatggcagctgttggatctttgaactggaagatgaacagagcgcctaacccatatggtgagtatcctttcccgcaggctactaactatttcaagtatctgctcgaaaagggacacaccacagcggcacgccatgttgctccttggatgatctactacggaacaggtagcgatatcttcaagatgatcattgcgcagttccctgagctgaaggaagaagtcttcaagcgttctggacagatcggtcatggcggtacgacatttgctgcgattcttgatcaaaagtttgatcctgttgctatgccttatatcagcctcgacgcgctgacctcatttgttcgttcgattgcaatgcacggatcaattgaagatgctgtcaaggctgcacgctgggcaagagcaaagatcatgaaggaacaacctgatcgtaggccttgggaacaagctggtccttctatggtaggtcttctgggaactgcatggttcgttgagccaagcgatcctcactatgatgaagcgctcaaggtggcttcaaagtggctgatctctactctcaagcaacaatatagcgaaagtgacatcaaactgttccaagcctacaacccagagttctggaaggtatggatttcagaaaagaagaagggcgctgagaatagtcctcacgctacaacctcactccgtggtatgatggacacttctgagtattcggaactctacatcaactgcctgaaaggccagggtctagatgcaatcaaggcaaacctgattgattcgaccacaggttgggctgctcagttgatgcaggttgcggattcggatgacattacgattgacgccaagaaggagcttgttcgtagattcgctcctgcgatggaagtcaacggcgttcacaccatccgagataagtcgcaccgtgactcgctcaacaagaactttgctgatgttctgctcgacgtctatgactcggataaggaccttgcagacaaaatctttgctgacctgcctcgaaccactcgtactctgatcgtaaagatgcagggtgagatggcttacatcgaagcaatcaaggacgacctctacaagcatcctatcaagcctgacttcccgcttgaccatgcccgtattcgtacgatcttgaagtacaacaacctggctatccgagtcacgtctaatcgaaacatcgttcagaccatcggtgatattgattcggcagctaagtcttcgatcagcaaggctcttgtggacctcaaggtctccgaagtgaaacaggatgagacggcgcttgaactcgagacaattcgtctcaataagttccgaaacaacaagcacggcgaagttgcattcaaggttctcaaatcgtttgacgttgcattcccaggcgcaagcaagagaattgctgaattccgaaagaacaatcctcaggatggtacgcttgatcctgtgttccacggaacaggtacaattgccgcttcgatggttctgcgtaacggattccagatcattcctgcaaacgactcctcagctgttggtcgtatgcttggtaacggtatctacttctccaatgtcatcgacaaggcacagcagtacgtcggcgacaagggtggtggcatcacgcgtagctatggtacacgtggttacatcttcgagatggaagccgaactaggaaagaaccctaaggactatcgttccgctggtctcggtcgcgactctatccgttctccggaatgggcagtgtttgatccggacaatcagcttcgtatctacaaggcatactacattgagcttgtaagcctcaatgcggttaaggcgatggctgcaaagcacaacaccaagttgaatgaatcggtaggtagctcatttgaagattacatgatggagaaaactgtggatacaaaggcaacatcgaagttctggttcatgggcgattcgttgcccaagtcgatgacggaaacttgcgaagtcagcgagttcaagtcgaagcgaaacgtctacacagaaccatcgtgggacggcggtacgatcgtttctatcgaacattcgctagacattgagccggtaacgatttcgattgatgacacggcgaagtggctgttcaacaagccagatgaagctaagttgttcttcgatctgatgaactgatctactaccaataatagctgggctcggaagggtccagctattatactatacgcacatcctatgagagaccccgcatgagcgacgcaccatttcatctatccattgataccgaaaccctcggtatgcgtgaaaacacggttgttctgtccatcggtgtagcagcattccagctggtgccaggtgcgaagaacgactatgacaagatcatccgtgacggcttccatgtgaagttcaatgtcaaggaacagattgtcaattacaagcgcaccactgaccagagcaccattgattggtggaaaactcaggaacctgcagcgcagaagattctcaagccttcagaagaagatgttgacatggcttctggtctgacaatgctcaatgactggatcaagcgttcggggtatcgctggaaagattcatttgtctggtcgagaggtacatactttgacttcccgaagctcgaacacatgtatctgcaagcgggcgtgaagtgcggcttcaacacctggaagattcgtgacacgcgcacgatgattgacgttctgactggctcagaaaacggacagtacgaaccagcaggtggcttcccgagaaacttcttgaagcacgacgcactgcatgacgctgcaatggacgcctaccgcatggttgagatcttcaatcttgctgcaggcggcgaaccggacgatggtccgccctggaaggaataaaatgagactctacctgattgtaaaccgctatagcatgagtgtccaggcaggcattcaggggatgcacgtcatccccgagctgtacgaaaagttcttgaatccgaagtggaaccgagcctacctgtcgaatctttctgactgggcacagaaccacaagaccatcatgctgctgcgcactttcggcggtgacgaaagtatcgaagagctttacgaaaagattgcaccgcctgcgaaaggtttgcaaatgccgttcgccctgttccgtgaaggcgcgctgcgaaactgtgcaactgctgtgggcgttgtagttccgtcggcttactacagcactccgatcgaagaactttctggcgacctgctgactctccgcgaaactttgagtcctttcccgttcgccatctaagattgttctttctttgtcatcgtttaaactgtgaacacatcaactaaaggaacaccgaagtgagcttgtcctacacccacagcgaacgcactgtcaagaagtacaccgtcaatcaggcatgcacctcggcgcgttatcgtctcgagaagagtggcctgaccagcatgtgcaccaatgcgatcagcggtcgttcgggcagcgaaatgatcactctcgaagagctgaacaagatcgctgacgccatcgtcgacgataccttcctgtatgatggccacaaggcccgccgccggtgataggaatgggtatggaagtctacttccgtagctttgtcttcgaaaccctcgctccttacttcgacaagtacaagggaatcaagttcaaggttgtgcgaatcgttgaaggttcgcacatccagcttgaggctattgatagcgacgtcaaggttgacggtctcgtccatgcagactatctgaaaagagcatgacccaggatatctacaagcaacttcgtgacctcgccggaaagatggatgtaaccatcatcactgccaaggctccgccccgttgggaaccggaccttcagggcggtgtccgtatcgtcgattacctcgacatattgactccttcggctggtcttcgacgtggcgagctgactgtgatcagcgcaaggacgtcttccggcaagtctcttttgtcggaggcttcctgtggcgctctctgattacgttctgttcctcgatgacgagcgtgagccaggagacttcttcaagaacgtcttgattgcccgaaactacgaagagttctgtgagttgattgctactcacggaattccgaagtacatttcgttcgatcatgacctgggcgaaggcaagaacggaaaggactgtgctgcattcttggctcagcgtttcttcgatcaacctgaggatgttgatgcgttccgatatggcgttcattcgatgaacccaatcggtgcagagaacatccgctccttcctcgaaagcatgaaaaggcatttcgcaaatgagtagcatcgaacagctcaatactgtcttggacaagatttctgtcaaagctcagtatgaaaaaatcggacaggacgaaggagttcgtgtcacgatcatgaacagcgacatttcgattgtgctcacctgggatgcgattgaagccctgagtcgttatgctgacaatcactggatggacaaggtgaagtccaagaagcgtttccgtaactccatggcatacgagttgagtcgtgcaggtgggaatgtcacctactgctatcactactcgaaacatcacatctaccgaatggcagaagccgactgggaaacactaccgggaatcatctgatgaacccaaccaaacaaatcgcgcttgagttggaacaggcacgtcgagaattccttgatgagccgtttactgccaagtggccagaaggccttgagcaggaacaaatctatcaactcgactgtgacgataagggtcgcagtggcgcgaattggttgaaggtctacaccgccggcgatggcgatgtgcatttgatgatgcaagactgggaagagtatcccgagtttcaacctgagttcatgccttcgctgcgttgtcgaacctatatcggtggaggtcggaattggcgtacccaccaggcattgctctggcttgcccaggcaattagactagacaacatagagaataggcgcaaccatgtttaagattttcaatggtacggtcaaccgtacacacttcggtgccttctacgggatcatggtgacccatgcttcgcagtggaacatcgacgaaggaactgacctcattcgttttgaggtttcggtactagatgacaaggctgacagtttccgagatcagctgtgtagactagtcccatgcgtagagttcgataaggagcctacggcttgggaaatgctaatcaattttttcaccaaaaagaaaggtaacgcctgtgaccaatgctgctgataatgctgtcgagtaccccgttctgaacgatccgaagatcctggccaaggtgaagggtgtctgtcaggacattagcaatgtgatgaccatgatcgaagcttcgcgctcgaccatcaaggctcacatcgacaacctggcggaagagatcgacattccgaagaagctgatccgacagatgagccgtacctatcatcgtcagacctttgaaaccgaagtacaggaaaaggacgctttcgagcagacctatggaaaagtcttcggcttcgacaacgactgagaacgaaatgttgcgcctcatcaacgagctttatgaggcgctcgatttcgatgctgagcactgtgactttggtcctgcctacggcatgtgggaaacgcgtcgtcgaaaggctatgcaggaagcacgtcgcctgttaaaatcaaaaaacttcaagcggagttgattatggctattctcgcagtgctcctcggtattgtcattgtcggtggcacgttcatcctgctcgccgatatcttcatcattcgtcctctcgagggatacagaaaggatcggtggtacgaccggttcgtcatgtaaagaactcctgtggtggttgggcacgagacccctagaaataggggttcttgtgtgataggctagtaagtgtctgattcttggtgccacacagatacgtaagtgtctgattcctaaggttgtcctgcacatagaaagaaactaatatgtggctgtaggcaataccaaccaaggaatgcagaaatgacggaagaaaagacgtatcgggttcgcagtcgtgtcctggctcttcctaaaggagccgacaaggcgaaacagctggagtatgcgctcaagcgacgtcgtcggcagaaaaagtcttggcctcagcctgaagatgcaatgctgattctccctctgcacttcaacgtctattcgttcagtcgtcagagcttccacgccgaagcctgcatggaaattccgaccaagaaaggtttcgagtatttcactgtcagcggtggcggcaggacacagtttgctgcactgaggcaggtcattgaaaagatcgaggcgtcagactggttccatcagatgaaggaacagaaagtctacttcaagatcactggcggcggtatggaggaaatctaccgaggttacctctgatctagtatcgtagttcatttgtagatgccaaccaagtctttaaaataacggatgtagtaaacacattcctgtggacattcgttatgacagaacagacaaagacaaagcgcaaatacaccaagaccttgaagtgggaagtgaacaacgagcaattctctgggttgacccaggcactcaatcgagtgaatgaactgctcaagactggtgcttcggaagacgtccgaatcaaacgcatcaagccagcaatcacgttctaaaggacacgggcgagagatcgccccttccttttgtcagaaattcaagctaggagctaatcatggcaactcacgttcgtattgactacgacgaacatcgttacgttacgcgtgccggatcaccggatgatcgctgggatcgcgacgatactgctgcagacatttccatcaacggcattgaaatcgtttctgaggcgcggtaccgcgaccttaccgttcccttcgatgtagacattaacaagtcctacattctgctttgggcggattacaacaccggcgatagctttggacacgacagaaactacgtcga

SEQ ID NO: 9 - DNA, 200185 bp, unidentified
  misc_feature 1..200185: note = the genomic sequence of a bacteriophage
  source 1..200185: mol_type = unassigned DNA
tcgacgtagtttctgtctcgagattccggtgagatagaaagattgttctttcgtaccacatctgtagactagtggtatgaagatcaagaccctcctcgcagccgcactgatgaccgtcgcactttctgggtgcggcgagatcatagaagaatcagaaatcattcctggcgcagaagctgagatggtagcgatgtgcaatgtgaatggaggctttgttcgcggatgggttacaccgatgaacaaatactcagcaggcaaggtttcgatcctcgaacagtacaggacagcctaccacgttgaatgtgtcaatggtgcgaagattgacaagctgttcgaaggcaagacaatcagataatatcaacccaagactaggagttagtcatggagtcagcaatttacagggacctcgatcctgaggtggcagcagagtgcggctacttcgaaccgaaggaacccttcaaccagatcttctcgcagccttgggcgcgcgctgcgatcagcgcatacgaccagatcatctactacccgggcagtttcggaacgttccatgatggtcacgtctcagtgatcaagcgtgctctgcgaaagtaccccggcgcctggctcgtgatcgcaccgagcaattcagactacgcttcccagaagtacggcgaatggtcggaactcgcatcgaataagcatcgctacgacaccatcaagaaggtgttggataagcatggcatcactgcctcgatcgacattgatccgatgctcaacaaccgctgtgatcagaacttcactgaccagctggatgccttcctggctgcaggtaagcgcgccggcatctacgacatggccaagcctccggtcatcctgtgtggcaaggatcgtgctgacttccagaacctcaacaactacaccgacaaggttatcgtcgagtggtttgaggataccactgggctgagcacttccaagctcgagaacaagaagcggatgaagaagcatctcatcctgcgctgcgtgaacgaggaagagttcaatctgttctgcgagtatttcgaagaccagtacctcaccatccagccgtattacctgcacgatgaaatcgagtctgccaagaaggcagctgtgatgattggggcgacccacaccaactgcaaggaatacgctggcttcttgccttacatcaagatcagccgccacttcaagaaccctctcgagaacggaaccgtgaacaattggttccttccgaatgacgcggttcttcttgactcggacatctttaccggaaccacgcaggcttgggttgagtctatgggcggaaagctccatggacttatcaatctcaaggactggcacggtgtctgggagctcctggatatcagcgacttccgaaagaaagaatgggcgtatccctttacggatatctccagccgctgtagcatgcaggcattcgataccgcctaccacgaccacttcaacgaattcaaggaaaagctcagccatgtccatccgtgaaatcatctcgccgaacgttaaggccatccttgctcttggcatcgaacgcgatacgccttttgagcttgatgctctcctgcacaagaatggtgtcatcgaaatcaacacgtcgctcgaccttctccccgaagtggatcgcgcgttcgagattttcgaccagcttggtgctgtgtatccggtctcggtgaccggcctggaaaacgtggaaagcggcgttggttcgcatcgcttctgcgcgtgggatggcgaattcgcggcgctcctgaccgaggtggtcaagctgatggagactcctgaactgatccagattggtgatcatctctgggagtttgagagcgtctcgaagtatttccgtttcatgcggtacgatcagggcggtgagcatttcccgcactacgacagcgatttcgttgtctacgatcatctgaaaaccttcggacagtcggttcgctacgccacgaagtattcgctggtgatgtacttcaacgactgcgagtcgggagaaatcgctttcatcgacaatgatccgaacccgacaaagggtgattggaatcgtcaggcgactgatgctgagatctccttgcgcatcaagccggcaaagggaaagatcgttctcttcccgcacactctctgccacactgtgctccccttcaccgataaggacagccagcgcttcatcgtgcgcggcgacctgatcttcacccaggcataagacatgactctcgtcccggtaaaccagaacgaactggaaatgtcggttcggatgttcaagcacatgttccgaaggaaggatccgtatcagaagattcttaccctgaagaactacttcttgaactggaacatcaagaaggttgtagtgggcgtctcgggcggcgttgattcggcactggttctcttcctcctggctcatatcccggacgtcgaagtccatgcagtgacgatcgatttcgacacctacagcgatgtctttgaccagggctatatcgagctcttgcagctggctacgacgcgcttccgaaacgtgaagtggcacaagaaagatctgactctggctttcagcgagatgatggtcgccctggacctcgagaaaagttctgatgaagtcttcgccaacaccagctatgcgatgcgttacctgagcttcttcgcctacgctcaagcactcggcggcgtgaccatcggaaccaccaacctggatgaaatgggctacgtgggctggttcgggaagaactcggatatgatggtcgacatccagccgatttcgaccctgcacaaattcgaagtaatcgagtgggcaaggctgttgggcgtacctgagcgtgtcgctgcccgcgttccgacaggtgacttggtcaacggtaccagtgatgaagaaaacttcggctgcacctatgacgaactttctttctacacgcaccaccgtctcaaagacccggacatggaagtttcgcccttcatggaagcgcatttcgaaggcgtagaaaggttgcgaaagaaaaatctgcacaaataccagggccagaagttcaacccagtcttcctgtaaagaaagatttctcctgtattatttgtagaacataaaccgaactgaggttcagatggaaatcgcgctctggctctgcttgatcccgatcacgtgggcggcaatagcacatttcgcattcaaaaggacgatcacctggaaagaaggtctgctccagggtggtggtatcgccctcgtagttctcctgatctacggttgcatggcatacagcaataccgccgatcacgaaatcctcaacggacaggtgacgggaaagaagcagacctggaccagctgttcgcactcgtattcgtgtaactgctacacgacttgcagtggcacaggttcaagtcgatcctgcacccgacattgcagcacatgctacgagcattccaacgactgggattgggacgtcttcacgacggtaggtaacatcgagatcgatcgtgttgaccgtcgtggtagccgtgaaccacctcgttggactgcggtacagatcggtgaacatgctgcggtgacgcacacctacaccaactatgtcaaggcagctccgagcagcttgttcaacgtcaagctggcggaaaccgaggcaaagtccaaggctgcgataatccctcagtacccacgcatctacgactactatcgcgttgaccacaccattgatatccaggcaggtgtcgcgaacagaaaagcctgggatgcagagctggacgaagtcctgaaaactatgggttcggcgcgacaagtgaacgtcgtgttggtcttcgtaggcaagcaaggtcgggagtacaaagacacgttggagcgtgcttggctcggcggcaagaagaatgatgtggtaattgtggcaggcgtcacaggcaccaagatcgactgggttgaagccttcacgtttggcaagtcctccggtaacggaatgctcgccgtcaagatgcgagacgagttgcagaagtacggtaccactgaaaatgcgaaggagggcgtggctgtaatcacaaaggttatcgcatccgacttccatcgtaagaacatgaaagactacgaatacctgaaggctgagggtggaccatcggcaaagcaagtttcctggctggttggtattgtcctggtcctcttgatggtgacaactttccttcttcacaagtacgacgtgttcaacgaggagttctacgacaggcacccgaacattcgctacatccgaaatagttttcgtcgttaatccaaaatcacataaacccaacaaaggtaattgataatgaacattcgtggcaacaagggctcggcgtggattgcagtgctggtcttcctgggcatcctggcactgggcgcagtcttcgctgtaggcagctatgtcagcgcagccaactacggcaacgaagccgagcagcgcctggaagcgaagtggcaggacaatcagaacgtgctgggccagtacaccatcaagatcggtgaaatggcacaggtgccggaaatcgcgcgcgatgacctgaaggaagttctgaaggcaacgttcgaaggtcgctatggcagcgaaggcgtaagccgtggtgctggtgagcagaagaccttccagtggttgcaggaacagaatccgaatctgaacccggaactctacaaccgactccagcagacgatggaagctggtcgtaacgagttcaaggtctcccagacggaactgttggatgagaagcgcgcctatcagacgaacctgggctatgtctggaagggcttctggatgaagctggcaggctacccgaaggtcgatctgtcgaagtacaaggttgtggtcggggctgacacggcacagaagttcgagaccggcgttgacactggcgtcaagctgcggtaataagtagaagtatccgacgaggcgctccggcgccttttcggttgatacgaaaccatacatcgttataatcagcaaaagaaaggagttttcttatgcagcatgatctcgcagttttcatcgggcgtttccagcctttccatctgggtcacctccacgctattgaggaaggcctcaagctcgccaagaaggttctcatcctgatcggtgacaccggtggtcctcgtggcctcaagaatccctggaccgcagaagagcggaagcagatgattctggattcgctaggcacctaccagcgcgaactcgtgatgtttgacattgcatacgacatgccgtccaacacggaatgggctggtcagattcagagcattgtcagcaacgcctcgaactggcataagctgcccagcgtaattctgatcggtcacgagaaggacgcgtcgagcttctatctcaagatgttcccgcagtggaagcacatcgacaccggcttcgaagaactggaaagcggacttctccgcaagtacaacgccaccgacattcgcaagatggtctggacgaacacgctgcattacgcaacgggtctcctgcatccgaccacgctgacctacctggtcaatcacatcaagcacaacccagctatctatgaagagtttctcgaggaatacggcgccatacaggcttatcgcaaggcgtgggcaggttcgccgttcccgccgatgttcgtcaccactgactgcgtggttatccagagtggccatattcttctgatcaagcgaggcgaccgacctggaaagggtctttgggctttgcccggtggcttcctggatcagaccgagtccatccaggatggtgctctgcgtgaactgaaggaagagacgaacattcacctgcaggatgatgtgcttcgccgttgcattgttcgcactttcgtccatgatcgtgcaggcggtgtcagtgaagaagaccgtggcagaatcattacgcatgtgcatgtcgtcaagcttgccgacgggaagccactggccaaggtcaagggcggcgatgacgcagccgaagcacgctgggttccgttgggcgaaatcaactaccgtgagatcttctccgaccacggaaagatcattgaccgcgccctgagtggcgtctgaggaattatcatgaaggacgttatcaacggctttttcgaagaagcagaacgtttgcaggctctggcagaagaacagcgcagcaaggctgctgcaatcctgacacctctgtttgatctccagcatcggcttgcatggtctgttcattgtgagcctgagttcaaagaactggaaaagtggtatcgcaagccgcgtgataagttcgcaaccaatgcgaaccgtcagcattcttactacaccttcgacggtattttctgcgatctctgtgaatggagcgatggtgattcggctgactccattgagctgcatcctatcttccttttggatgtacctgaggagtggaagaaggaagcaattcgtcaggtatatcgagcagatatcgctgccgtagaaaatcagaagcaacgcgcgaaagaagctgagctggaaaaggctcgtaagcttctcgctgaaaacggtgtgtctttctaaggcacactgttagactataatcacaccaaacgtagaaaggagttttctatgattttcaatccgatccttgcaacagacagctacaagttctcgcacttcatgcagtacccgaagggtaccactctcgtcaagagttatgtcacggcgcgtggcagcaagattcctggcgttaccgcggtggtttgtgctggtctgcaaatcttcattcacgaatatctcagcaagcgcgtgaccaagaatcacgtcgatcaggctgaggcattctgtgccaagcacggcgttcctttcaaccgcgaaggttgggacctgatcgtaaccgatcacaacggctacctgcctgtcgagattcgctcggttgaggaaggtacgcctgtgccgctcaacgagctgatgatttccgtgatcaacaccgacgagcgtctgccatgggtgacctcgtatatcgagacgctcctgctgagctatgtctggtatgcctcgactgtggcaaccaagagccgcgagatcaagaaggtcatcaagcagtacctggacctgacgtcggacaatgctgatgcggaacttccgttcaagctgcacgacttcggttaccgtggtgcaactcctggcgcagctcatgttggtgccttcgcgcacctgatcaacttcatgggtactgataccgtcgccggcatcgaagctgcaatggagtactacggtgcggatgtctgtggttacagcatctcggcttcggaacattccacgatgaccagttggggtcgtgatggtgagtttgatgcctaccgcaacatggtagacagctacgccaagcctggtgccatcttcgcctgtgtgattgacagctacgacaccttcgcagcaatcgatatgttctgcgaagaccgttgtgcaggtggctcgctcctggacatcgtcaagaaccgcggtgcaaccatcgtgctccgtcctgatagcggtgacccgatccagatgccaattgacgtcatcaagtacctgatggaaaaggtcggctacgagatcaacaacaagggttacaaggtcctgccgagccatgttcgagtgattcagggcgatggcatcgatattgaagacgttgagcacatcctagagaccctggtcgaggatgaaaagatcagcgcctcgaacatcgcatttggcatgggtggcggactccttcagaaggtgaaccgtgatacgttcaagtttgctatgaaggcgtgctacgctaacatcaacggcaaccacatcaagatcgtcaaggacccggtcaccgatcctggcaagaagtcgaaggcaggcgacctgcgcctgtaccacaacccgaccactaacgagtggaagactgtggacagcttcaatgtcgaatgctacaagatgaccaacccaggctcgcagtggtatcgaaaggaccgtattgtgtacagccacaatggtcgcgatactttcttcgatgcagttgacatggatactgttcgtaggaatgctgctctttaagggcagcttccttcataattactatggtgagatgaatgattctcaagagcgaaatcagaatgtccaaggctgaaattgaaagcctcatccttgatcacctgaaaaataacaacaagcacaatctcaagcttggtcgggtaagcttctctgttcgtgagtctgacgaccactatggtggctacactccagctgatcttgaaggtgcaactatttctgtggaactggagcttgacgatggaagagaggatcgaagataagattttggcttatctgcgcggtgaggcggactacgatgttacccaactgctgcgtgatgcaagaaacgagatcgaaaaactgagagcacgtgcggttgatcttagctgggcggcggatgttgccaatgaccgtgcagatgctttcgatccgaggtacaactaatgtcactgaccaacctgttttcttcagggattgaataccggaagcgcgtcatggtgctggtcaccaagcgcatgctgaatccgaaacggggtggtggagtctctacgtttgtgcgaggcattgctaagtctatgcctgacgacacactcgtagagattcattgcgttggaccagataatcttgatgtctatgagattgatcatccgaatgtcgtgacttatggttatcctcagatggtgaagatcaaggcagaggagccaggcatcttccagcgcatcatgatcaacttcgatcagatcgaagaattccgccacgccttgaacaagtcggtgttcacggaagagaagctctatgatgcgattgtgactacctgccctgagtctgcattggcttgcatttccttcggagcgatgatcgaaccattcaatgtcatctataccacacatcacggcttgatgtctgacagcctgagcaaggttcctttcgatgacgctgtgatctacttcgccaacgaagtgattccgaagtctggatttgtcaccaccgtgactcagactcctctgaatgctgagtggctgcaggaaaagcatggtgtcaaggttgatcacgtgattcctctgctacctgacgagcttcctccttttgctgatatggcaggtaaggaaggcgcactgttcatcggcaagtacgagactggcaaacgacctgagctctttgtcgagatgtgcaagcagactggcatcaagggtaaggtcatgtgcggtggtatcaaagctcccgacgcatggcacaaggctttcaaggaagctggagttaccaactacgagatccgtcagaacctgcaaggcaaggaaaaggaagatttcatcgcatctgcgaagttcactttcgtttcctcacagaacgaatcgtacggttaccttgcactggaaggtctgttcaacggtcctaccatgattgcagacagccgatgggcgaagttctgggaaggctatggtgcaactctgttcaccaaaaagaacatggctgaggtggctaaccgtctcaatgagatgactctgtgggacaattcggatttggttgacatgctcgctgaggcaaaggcgaagtgggttgatatcatcaccaaccgaaagcactatggcaccaaggagacatcctcgatgctcaagtttgtgacgccggaatggcagactcttgctgaactggcaaaggcgcgcgatgttcgtagcctgtcaagcggagactacaagcctctgtttgatcactgcgagatcgtccacaatgacattgaatcaaaggtgcgacgtgtctgacatcactgtaggcgaaatgaagaagtggcttgagcaatttgctgatgacactacgctgacgttcgaaggaaacttcggaccaggcttgcctcaaattgatttgaccaacgatcaattccagtataactcatgggaggcctggtcttactcaccagccaggcagccctggacttatacgcctaccgaggaagctaagtcgagaggtaatacgactaagacctacccttatcatcctgcgaacatcacgctcggtgaacaatcgtgaatgacggtaaagcagttacgcctcaagaattgaaagcgtggatgttcaagttcttcggtgatcactacggccttcttgagtgtaagaaggcccttgccatgaatgaaagaacgagtgacgctgtaaagtggctaatcaaatcagacctgtttcggatctgatatccagcattccttttgacgaatgaaattatcaattacaatccttgcatgaaaattgtccaattcaaaaacggtaagtttggtgtcaggcgctggaacttcttcaaaggtttcttcggtgagtatgaattcctcaattttagaggtgaatgggaaacacgcgctggctacaacattgaaaatatcgaatacggttctaaagagacggcggaaggatacctgaaagactacgttgattctgaggcgtctttccaagcattcaaaaatgctgcccgtgatatgggcaaaccggtaaagtgaagctacatcgtcacgactaatccagtgacgcaaattatatgatgaacaacaggttgtccaactagccgtcggctaagcgtagtcgcgacgtgagatagagtgggcagggcgagcaatcgtcggaagtgcgtaatgtgagaataaggaaccgagaggttctaaagtatgacctgctctgccacacggcaacaggtgttaggcaagttgattactaactgaattcttgtctatggcgtgaatcccgcaaagggaccaaagtgcaattatagggcgataccgttcacctcgtcctgctgggaagcagattgcaagtttgagtggtgatggtatggacgcagttcccttttctcatcgtcgcacttttggtggtaatagccaaagtgtggctccaataaaccgcaattcttttaaaaacatattttatgaatcaatttcgatatgcaggtataggatctcgtgatactcctgtctccttaaaacaaacgatgatggacatagcttacttcttagcgtatgaagctaatgctattctcgtatctggtggagctcgaggtgcagattcgttctttgaggaaggatgcgatcgtgcaggtggtaacaaagagatctggttgccagaagcaggcttcaatggaagcaagtctaagttgattggtgcatcgaaggatgcctatatcgtagccgagcgatatgttggtcattggaagaaatgtaaggcatgggcacgagcagcacacgcacgaaactgtcatcaggttctcggtgccgatctcctcactcccgtttctttcgtagtgtgctggacacctggaggtgagagagttggtggcactgctacagcgatttctattgcagaagataagggcattcctattctcaaccttggatcgaaagactggtctgagacagaaatttctgattggctagaaatccggctaaattgacctttctaggtactgtctgtagactgtatggactaaggtgattaggagttagtcatgggttacggaacacgtccgaacgatttcggtggaaacatcagaactttccagcctgacaatacgaaagatgtgctgtacatcgacacgactttttcgtcggtaacgctgaaggaactcatggagaagatccgtgaacacttcggcagcgatgatatcgagaaattcgacatcgaggctcagtacatccacacggattgcctgggctacgactgttatgaccccggcgactactccagcttcatcgtcatcactcgcacaggaatcctgtaatggctgctcgattcagtcgtcacgcgaagcctctctaccgtatcaaccagcacggtgagctctacaaggcgagtgaagaattcaagaccaccatccgtcgagccggagtctggaaccgccctgcatgtttccgttggtgggctgaaggatgccgagagatcaacacctgggtattcgattcccagggtcagcatcgtctcattgtcggatacgatcctgagactgacctgttgtatctcggacgcaccatgaccgaagaacgccacctccccaaccgttttaagaatcgagacatctgatgactgctctgctgattggctccaacgcacttcgcgcacacggcatcgctgttgagcgcaggaacctggacatggacttcattgctacgatggattctatcaaggcgatgatcgaccagaacaagacgcgcttcgtcaagattcagcacagcgaagatgcgaaccatctgttcatgttccctcgtaatgggaacgacgccatcttcgatatcgaaatcgcatggctcgattctgtcagtgataccctcattgacatcgtcctgaacaacggcctctacaagatgaccgaggagggctactacgccgtttctccgtcggttgtgctggcactcaagctgtcgcacaagtacaagaaaaactcgcgtcacttcctgaaaacgatgcgtgacattcagatgctcaagggacttggctacaaggttccgaagtgtctgagtgagtggctcaaggatcgcaagaagtggacctacgactataagcatcccaagttggaaggtggtgtgaccaaggctgacttcttcaaggacgatggcattcgctatgtctgcgatcacgacagcatccatgaagctgtgcgtcatctgaaaaagcctgcctatcgctacttccagcctgacggtgaggaagtgggcacgtcgaaggaagacttcttcgctcagccgcgtgaggtacagcttctggcagtcctcgaggaaagctatgtgctgagtctcgagcgcgccattgttccgttcaacttgaagactatcgagcagcggaagaaggcttttgacactgctctggaaaaggtctgcacgagcatcacgtctggttggttccggaagtttgcctgggataactttgacgaagtgaatgacctgtataatcaggaatatgtggaccgcttctggcgcgaagtcgaaagcggcaatgtgaagccctacgtgaaggaagaaaatgcttactgaaactgcaaaggcgtctatcatccaaaaggtcgaagagatcaaggcgctgatggatgaagcaaagctgatcgggcgcattgacgtctcaggtcgtgatgcttacccaggcgatttcgtgatcgacgagatccgcaccattgctccggcgggctctgagcactggtcgaacagttcgtgctgggatgatgaacctgtcccttatgacccgccctcctggaatgcgagtaactgctaatggctaaagacaatttccaagaacgagtagaactcatcaagctccttgtcaatgaactggataaggaactgactgacctcaatgtgaagcacaacgtcgattacaagatcgacctgcaagtccaagacgaggacggtaattatatcctcggcgcccaagaatccagcgactggaacgcgagttggtgctgatatgaaggacgcctggtttgaagttgtaatgggtgcttctggagcatcactgtatgtctctgatgaagatggcaccggtcatcgtctttctggaagtaagccctggggtggtggtcatacagcacatcgcttcaaggtgaacatcgaggaagcaattcgtgaactagaagccctgcgtgacagggaagaggaagaggaatgatcagtccgtgtgatggtggcggaagtgtcgacccgggtcgcgccaagtttgaggaagctgtcttccggcagtatttcatcaagcatgttggaagtgatctgaggatgaagccaggtatcgtcaacaaggctgagttctgcaagcgggacgaaaatggtaactacgtgcgcgaagaagtaagcgcaatgtggtttggttggaaactttatcagaaggaaaacgtgtaatgaccgtcgagaaagaacgtcatcagaagatcgccgcactcctggacagtgcttccaagcagcttgaagaggcacgccagttggcaggcaacgacacctatcactggtctggtcctacctatggtatgggtggctggatcgagtctggcgaatggcaggcatctagccattcttgctgaggaatgagaaatggaatacgctgattttgaaagccgtaagaggcgcatcgagcagttgattggtgaggctgagggcctgctcgaggaagctcgagaaatgtccgatggtctctttgatgaaggcgcaacgcgttcctggcaggcaaagccttcatttaggtttgaaggcccttcgtatggtatgggtgggtcgctgcaggatggcgaatggtttgcatcgagccaatcgtgctaaaaagagtgaaagggtgggacattggcacttcggtgcctttgtccttttaggtaaaccaaaggaatatcatatgcaacgtgacttcatcgaaacctggtctggcgtcaacctctacatgcctgacccggatccagaatccatcctaatcgaagacattgcgcacgctctgtctaaggtatgtcgtttcgccggtcatgtggatcgcttctactctgtagctgagcactccatccacgtctcctatgctgtaccaccggaacatgccctccaagcactgctgcatgatgcaactgaggcttacctgtgtgacattcctactccgttcaagcggatgattcctgcctatgcggaactggaagacaatctgtgggcagtgatcgctgaaaagtttggcgtgccgttcaaactgcacgagactgtcaagctggcggatcgaatgctgctcctgtcggaacgtgatgcactcaaggaacactccaagcgccaatggcctgcggaatacgagaaccatcgtcgttgggaaggcttctatgaaatgaacctgacccaggaacaaactgctcgtgtcttcctcaagcgatttgcagctcttcggtagagtaaatactgggaagtaaaccccaacatggaattgaaatgagtaccgaagaaaaagtgagtgtgctgcctctgccggaagatcctgcttacctccagtggctgcgaaaggaaggctttgaactcgaaagcactgtccctatggaatcagacagcattgtctgggttcgtaagacaaagtatggcgtgccacgttgtctgatgaatggtgttgtccttgtcgagatcgtgaagaccggcgaccagtttagcatgggcgttcgtgcctcggctaagaattactggggtgcggcttccatctatggcattgatgaagagaaccttgtaaggctgggacgccagtacgaacagcgagtggtggacgcatggcgggaattgagcgcctaagagaacagattgtcgattaccttatcgcgaataaggaggcaatcttgatgacgcagcagtctcagttctgtggaccttgtggtggcatgaaagtcaccacagtctaccgtaacccagattgtggacaaattggagtctggctagatgattacagacgagaaacgggcacttgagccccgagatcgagagtacatcattttcgttctagatggagcatacgctcatggtgaaagtctatctgagcacctgcatctattcgacgaatttgagatcactcgtgcacaacgaaacgaagttatcttagcatccgactttggtcaagatgaggatcttgtttcagcaatcactttatttgggtgacctatgtcttatacttttacggacggcttgaaagacgtcatcaacggtaatttttcaaacggtggtgagtccaatcgcaggtacgaaatgtgcaaggcttgcccactgttcaattctgtcgtgctcacatgtggttcttgcggatgcttcatgcctgcgaaaaccaaactcgttaacgcaacatgccctgagggcaaatggtaaaatgacctaccgagacacgtatttcttcgacctgtgccgtgaggctgggttcgacgtaaccgatccacacgattgggtcgaaatgagtattttcgctaaggaagtgctgatcgaagaatcggaagaagactgaggcttgttctttcacagtgaatctataaactatgatttgtgggcagtgtgccccgaggtgaaatgaatgttcaagtgtcctgtttgtggtgattactccaattcggctgcttcattggagtcgcacgctgcttggaagcacggtcgacgcattcgagctgaaaactatcgtgcaccatcgtatgatatgacaccgtcaagtactggtgacgcacttgttggtttggctgtaggatatgctttgtcatcgatgtttgattcatcgagtaatgattacagttcgtcatcatcggattggtccggtggtggcggagactctggaggcggtggcgcttctggggactggtaaaaagttgtaaagatatagtggtatgaagccaatcgaaaggttgcttggacgcgggttcgattcccgccaggtccaccaagaacacatttgatcgccttagcgggctttctctagtcagagcggatcgtccttcggtgtctgacaagatgggaagcgtgggcaagagtaagatgacgtgagcaccacggcaagtgtgttgttgatgggcctgcccaggtttcgacaggcaggtaattagaaacgagcagaccactgttgagagtatccactcaactgaataaagatgcaaactagctaaatgtcgctgctaacgacgccgattactccgtagctcgctacgcctaatcgctcagtcctcgcccctactgagttcctcattggggcccctaatttcattcttcgagagattaaatacgaagaaaaggcacacgaacaatgactgataacgaacaaccaaagcagagaatcaatcctcgcatctacggatggttgtccgatatcatgacctgggtcggagtgctgttccttggtgtaatcattggcagtgctaccacacagtcgattgcaatcaaggaccgtgatctgttggtgtcatcctacacccagaccattgcaacaaaggatcagttgattgaatctttgtcggtgacaacggtgaaggctgctgacgttgcactcaatcagagtacgactgaggtaaccaaggcacttgatacaatgtctgagcgcgataagacgctgcgcgacattgagaagcgaattgaaacaaagcagcgccaagatgcagcaaagaaggctgctgaggagcgtaaactgcgaggtctcaaatgagaattctcgtcctgttgttagcacttgttctcgctggatgtaagcacgttcctttggatttgacggaaccgtgttatgtgccacagaagaccaccgagtcggttgatgaagctgtaaggcttgccaatgaccgtcacgatgctcttgtggagtgtaatgcgaaactagaaaagatcagaacgatcttagacccaaaggccagtcaatgagttttgaaacgtacctgaaagaatcagcagcagctgaggaagcacacaaactaggattgtccgcagccggctatggcctttggcgcgacaagactggtaaggtggtgaagaagaccgtagatgataaacttgtggacgttcgtggctctgaggcgaacctgaagcatcatcacatcaacattcctcagaaccgtgaaggcaaccatgcagagcacgatcagtcttcggacattgtctctgcacatgagacacccggaacattccgcgaaagcgaagtgaccaagtatcacatcaacgaacactctgcggtacatcctgacaaggctggagagctgcacaacgcattggttggcgcaggctataagcattctccatctgcgtttggtcagatgtatcaaaagggtaagacctcggtgatgatttctaaccgtccagagattagcgcaaagcgcggcggaaagaacgatcatcacagtgttctaattcgtaccgatcatgtggcaaagaagaagcctaagaagtaaacctttgaggatttgattatgagcaggctggaagattttgttatgccggtagggaccgaagagattctcttcattgatggcgagcatcgtgtggtaaagatgaccgtcattgatcgccgtgaagcaggtactaatctgttccacaattttcatatccgtatgttgcaggatgcacatttcatctatggtttgaaaaagaaagaggttctaaagtctcgttggggtcacatgacacctgatgaatcttttgaccttgctcagtcacttagcaggatcgcgctggacctcggtctggtagttggcaatggagtgaggatttaattatgtgcgttgtttcgatgattggtgactcgttccaggatcgttggaaggatcgtcttccgaatgattggaccattccggcaatgccgatgccttcgcagcctatggcacctccgttcaaggagcgccgcattgatgtatcgcatccgttccaggcgatcagtcgcgttgagtttgacctcctgaaaaaggaagtcgaaatcatgaaggaccttctggagcgtgctatcaagtacgacaaggacaacaatgagcctcattgcgagacggagagcaagatcgcattcctcaagcaagtggcaaaggctgttggcgttgaccttgaagaagtcttcggtaaataacaatgaagagcttttttgacgaacagggtagcttcaatgaggacgcccggcagttcacaaaagacgcgcaagagatcctaaggccactaatgcagaaatatgccggtgccggatttagctcgcgtgaaatagtttacctcatttcagatgtggcttcgattgaagagatctacatccgtcaggtaaagagaatcagagataagcgtccttagatcagttggtagatcatctgctcgacacgcagaaggccacaggttcaagtcctgtaggacgcaccaagttttgccttagtagagaatggtatatcgggcttccttaaaagtcgccgtcattgtcggttcgagtccgacctaaggtaccaccttcataagcgcccaggggtgcagagagtttcgctagtatctcgctgcaacgacgtttattgaaggaacatgactagcacagaattcgcctcagtagagaattggtagatcggctccgctcaaaacggagtgtcattgtcggttcgagtccgacctgaggcaccaagatgacaaacgaagaaaagatcgctgcaaaggcagcagaagtagtacactacgaaggagtccttgaacgttacggttcgggtcgctggcttgacatgggtcgccgtcacctggctgaattgaacagggaacttcaagagttacgctctcaaagtattgatggtgatacgccgccctcgtaacgcggataagacagttcgactctgtctgagagcaccaaaacctggctatgtgggtgagcggtttagccgacgtcctcataaggcgtttcacactggttcgaatccagtcatagccaccaattgaaatgagccctgttcattcagggcttttccttggctggtcaggtataagtccttgatactctattgttcatagtgggtgtcctgtattataaccactatagcttgtgggtaaataaaaaccccgtcatattgaggaagtcaggtgtaaggcatgggcagaaaagaaatcaacgtaacaaagagaaacggcaagcgtgagccgtatgacgtggcaaagattcaacgccagatcgaatacgcatgtgatgggattgctaatgtatcgcagtccatgattgaactctcgatgaacctcgagttgtttgacgggatcaagacatctgacattgatgagctggctatccgagcagccgtgaacctgatcctcagcgaagagggtcacaccaactaccaatacgttgcaggtcgtctggcatcatacgctctccgcaaggaagtctatggtcagtatgaagtgccttcgctgttctcgattgtgaagaagaacgtagccaagggcctctactcggatgaactgctgacctggtactcggaagatgagtggaacctcattgagacctttgttgaccacaccaaggatgaacgcttgtctcatgctgcaattcagcagttggtagacaagtatctggttcgcaatcgctccacaaaggaatacgttgagacccctcagattcgctacatcgtagctgcggcaacggcaatgcacgctgagcctgcaaagcagcgcatgaagcgaatcaacgaatactacaagcaggcttccaatggcgaattcaccctcccaactcctgtcctcgccggtcttggcacaccaactaagcagttctcaagctgtgtcctacttcgttctgacgacactcttgactctatcttcgcaactggcgaaatggtggcaaagtattcggcaaagcgagctggcatcggtctggagatcggtcgtctgcgcccagccggtgcacctatccgcggaggcgagattgctcacacaggcttgaccctcttcatcaagaagtggttcagtgatatgcgtagctgctcgcagggtggcatccgcaattcgtctgcgacactcacctacccgatttggcactacgagtttgaggaactgatcgttctgaagaacaaccagggtacagaagagaatcgtgttcgtcactttgactactcggttgtcacctgcaagtatctatggaatcgtttccgtaatcaggagatgatgaccttcttcgatccgaatgaagtgcctgacctgtacgaagcatactaccgtgatcaggctgagtttgttcgcctctacgagaagtatgagaagcaggatggactgcgcaagcgccagctcaatgcagcagatgccttcggtgcattcctcactgaacgctcagacaccggtcgcatcttcgaggtctacatcgacaacgtgattgatcagggtccggtcgattcccagacctggcctatctatcagtcaaacctgtgtcaggaaatcttgctgcctacgcgtccgttccagcgtttggaagatgaagaaggtcgtatcgctctctgcaccctgggttcgatcgtgctgggcaagttcaagaagcctcaggatatgcgcggcgcatgccgtactctggttcgcagcctcgacaacttgctgtcctatcagatcttcctgtcaccacaggctgcgaatgcaaatgaagacttccgtcctctgggcattggcatcaccgacctggcacactggcacgcgcaacgtggttatacctacggtcagcctgaagcacttgctgagtttgctaagtggatggaacacattcactactactgcatcgaggcttcgattgaactagccgaagagcgtggaccgtgtaaggaatggaagaacacttcgtatgcagaaggcattctgcctatcgacaagcgttcgcctaacctggatgaagttcacaagattgagctgactctggacttcgacgctctacgtgagcgtgttaaagtttcaggcatccgtaatggcctcctgcaggcaacggcgccagttgaaagctcgtcggttgtagttgattcgtcgaatggtatggctctgcctaaggcactgatctctaccaaggaatccaagggtagctcgctcgtacaggttgtcccagagtacgagaagctcaaggatcgctatgaaccacttctcatgtggaatcagcgagactgcgttggttacctgatgacggctgcactcaatcaggcgttcacagatcagtcactgagtacagacaccttctacaatcctgcgttctttgaaggcaacaagattccggcaacattggttgctaagaacatcatgaacttccatcgctggggcggaaagactttgtactacagtctgatgaacaagcgcggatcgaaggatggtctggaggaagtgaaggtagaaacagtcgttgaggaggtcattgcagatggagaagactgcccagcatgtactctctgagatcgattggtctacagtaagcattggatgtcctattccaggtggcgcacgcccctggactcaggaggaaagagataggcttcaagaggcgatgaaaaagatcatcgcccgtgaggcagaaatgagagctcgtggagagattgaatgagtcagtttgatatcagtacagaaaccaactaccttgaccgcaagatgttcctggatggtactgttaccatgcagcgcttcgacaaggtgaagtatccgaagatccagcagtatgagaaagtccagcgcggattcttctgggtgcctgaggaaatcgacgtcaccaaggaccgtcaggacatgaaggctgcatctccggcaggtcgacatgccttcaccagcaacttgctgcgacagacgacgcttgacagtgaacaaggacgcgcaccgctgcagattttcggaccggttgtgtctctacctgaaatggaagccctcctgtctatctggggcttctttgagacaaacctgcactccaacagctacagccatatcatccgtggtgtctatccgaacccaggcgaaatctttgatcaggttcaccagaaccaggagatcattgatatggcagcaagcattggtcgctactacggacgccttgatgatttgaacgttcgtaaggcgcgcggtgagaatgtagacatcatcgagcacaagaaggcgatctggatggctctgcacgcatcctacgcgctggaagcaattcgcttcatggtgagctttgccacttccttcgcaatgatggagaacaagctcttcatcggcaacggtacgatcatcggaatgatcctgcaggacgagcttctgcataaggaatggactgcctacatcctgaatcaggtgtgcaaggaagatcctgacttcgcaatgatccgcgatgaaatggcggaagaagtctatgcgatgtatgaagaggtcatccaggaagaaaagaactgggctgtgtatctcttcaaggaaggtccaatcattggcctcaacgtgaagatcctccactacttcgtagactggactgctaaggaatgtctcgaggcggttggcatcaagtaccgtggtgaggctcctaagtcgcatccgattccgtggttcttgaagcatgtgaagcaggagacgaagcagactgctctgcaggaactggaatccaccgactacgtaatcggctcactgacgagcactattgactatggcgacctgcccgtactgtaagaaggaagcaacactcgagacaggcgaaacgatctacccacaccgacctgacctctacacgctctacttctgggtgtgtatgaagtgtaaggcgtgggtaggttgtcatggaacgtctcagataccaatgggaagactggccaatgcatcttcccgtaagctaaagtccaaggcacatagcttcttcgatcccatctggaaaactggctacatgacacgcacacgcgcgtatgcttggcttcaaggaatgacagggctctcagcagatgactgtcacatgggaatgatggatgatgaaatgctgaggaaggtggcaaagatgtgcagacaatttttacttgaaacaggaattagaaacgatgtatgagatctactcgaaggacgcttgtccgaactgtgtcaccgctgcctcactcgcagagtcgaagggcattgaattcaaagtcttgaagttggacaaagactacacccgtgaagacctcttctcgaaggccccttcggctcgggctgttcctcaagtctttaaggatggtgtcctgattggtgatctggcggcgtttcgtcagcaccttgtaagtgtctgattcttggaaaactgacccgaactgactctaacagagtcagaaattgactcgttcttaacatctgcgccgtttggttcagattggactaagaacgggtcaatttcttgtcagagcctcgtgaagagagcctcagaacccttgatacctctagcaatgaaaaagaaatgaagattcaggttgtgccttaacgctaccttcattaacattcgattgtggtcagcgacagggctcagaaaggccagtcggactgatcgaggggttccaacatggggacaacatgaagacacagaaagacgcgatcaggcgcgagctgttagatcgtgcgacaggtaaaggtagagagccgacgtgggacttggacgtcgagccgaccaaactggaactggtcaaagcactcaacttctattcggcaatttctacgccggagactctcaagaaatatgctattacgtgggcgagaaagaacgccccggaacgccttggggtcgtagaagcccaacccgatttcaagttccagactttcggtgcgcttatgcgtattgaaagccgcggaatgaagcttccaaaggcagagaagaattcgattgcgaaatttgtgaacgaacttaatatgcctttcaccgaaccgaaacaaattaagccgaggaagaaaaagatgtcgaccgaaaacgtgaactaccgcaacttctgcgacgccctggacaaggccaccgaagcggcggagttcgtcaagcccgatctgaccgttgatccgaaacattcgacggcgtcggtgatcgaaacctgtcagcgcgagctggaagcgatcaaggaagacggcgacatctatccgaagcacatgacgcagtggttcacctacgtcatgaagctgatgaacggcggcaagctgccggaaaaggcgccgaaggaagtcaagaagcgggtcgaaactgtcgttcacgacaactccgacgacggtgatgacgattcgactccgactcgtcaggcacgcgccccgcgcactccgaagaaggtcgcgtctgccaagggtcccaagaccccgactctcccgaagaacgatccggtgccggctgctgaccacgttctcaacggaaagaaggtcgctttcctcttcgacactcgctacggccgcctgacccggatggtctcggattcgaagaacggcttcgagatcaagggcaagaccatccacaacatcgaccactccaagtcgaaggtcgctctgctcaagaacttcggcgatgcgatgcagcccggcaagaacacgaccgacgaactggtcggctggatgggcaagtgcgtcaagaagggcaacccgatctcggtgggcagccgactggcagaagaagtcctggtcctggaagccgcctaaggcacaacggccctagggagaaatctctagggctttttcattggtcggagatcgtaatgagccgttgttcctgcaagaccacgacgcgcgaaatgacctactcggagttcgttgcctgggcacacgagtatgtcactgagagatttcttgtcggtggcctcaaggctatgcgcgacgctatggaaatcgtcgtccagcagcagtccatgaaccattcattcaacaagggaagcttcccgaaggcggacaaatgagcatccgtagttggtggaagaaaaacgtcaccgaaccccgtcgtcggaagaagttcttcaaccttcgagctcggcatggctcgtccactcgataccacttcctgatggtcaaggaagctctcgaagacctcctgtaccgtttggattccaccggaactgtgtctcaccccgaagccggaatctgtttcaacgcaggcttccagattggtggggattggcgtgatgccggtgagaccttcctcagcctggcagaaatgttcaacgctgaggttcgaggcctcaagaaaaagttcacgttcttcaccgacaatttcccgttcgaagacgtcgactccctcgatgggttttctctgaacaagtgggttggtgagtccctgaaggtccggcgtgcctgtatcgaatggatcctcgacaacatcgagaagcatcaactgcaccggggttaaatatctcgacacatcaatcgagaacgaaacgtggccaaggtaccctacgacaaggcgaagaaaattctgaccactctgtaccaaacgggaggacaggtttctcgtgatccggtaggtcagaccacgccaccgaagggatcgactgtgccgaagtccgtcatccaagcggcaacgccagaaaacaatctgagggtgacgaagcagccacgcaggaatgtgatcatcatcacacccttcatggcggaagatccagctctggcagagaagatgaagaggtacgctgctcgagcgaccaaggactcgttgaataagaacgaagccccgctcgcatcgcatctgttctactactcagtcttgaacgaaaaggatccgattgaacgagacattggcctccaatctcagctgagttggctcaaggttgcagacgtggtagccgtgtatgtagacttctccgtaacacctgcaatgaaagtggcgatcgacaacgctcgccttctacagaaaaagatcgaattccgaacaattggagcagtggcatgagtcgtgattacaccaacttcccgcaccgcgcaggcgatgtctatcgactgggtgagtcgaacctgtactacatcctgtccattgtcgaaggcgactcggtcaatgacgactggctcaagtatgccctgatcagcctcgacggcaaccgttggtgcgagcctatcgcacttgaccgttctaatgaactccctgctgacggtctgacggaagaagagttcaccgcccttgtcagcgcagaggaccgagaagctttcgtcaaggcttcgggcaggctggttttcgcctcgctccactgatagtccaattcggaccaatgctggccaatactagcatgtgaaggtcagcgtgaaatctgacagtctccgcagccctatgcccgtcagacttgttcagatttcaccgggtctgacgtaagtgtctgattctattggggttctggttgtgaaggggtaccacgtaagtgtctgattctattggggtcgtcacacatgaaggtagcgtttacagctcgtgacgggctgacaacgaaactttaacgagtctcttcacaagacccggagttctgatacagtgtctgacaatgatgtagagaggacgtgatcacctgtagcatgagtcttgtcctattccggactctgttgaggaaatatcatggctctttatgcaatcaagcacatccctaccaatcgcttctacactccaaacacttcgggtgctttccgcaccggacgcaactggagaaagggaaaaggtgtattgtttacggacaaggctgacgcggtgaatgaagtggtaagcctgatcaacaagcatcgtaacggtgaagagcagcttcgcattcgtacctatggcggatacgatgttgcacgcgccgaggatgcagttggtgatggatacattcgtgatcgcgatttcagcgtagttgacgtgaacgtttaagtttcctccgtgtggcgcactggccaaggatggccacctattctattccttgagaacacgatgacaattctttcgatcctcaatcaactggctgcgacttcgagccgcctggccaaagatgcaattctcaaggacaacgcgtccaatgagacgctcaagcgagtgttcaagctcgcatacgacaagaagatcctcttctggactcgtactatcccagatgaagccagctggtctgacgatcctcccttcatcaatcttgacggtgcactcgaccagatcgagaagaacatctgcacacgcaaattcacaggcaatgcagctgctggcttcctggcaagcatgttctcccagctcgatcgcgacgatgcaacggttctcaagcgagtcatcctgggtgacctgcgtgtcggcggaactcgcgaaacggcaaaccgttgctggcctggcctgatcgcaaagccttccttcatgctctgctcggcagactacgacgaagaagagatcggcttcccggcgatcagtcagaccaaggaagacggcgcccgttgtcgtctggaatgggatggcgagaccgcaaccctgaccagccgtgcagacaacgaaattacgcatcatgcgacgttcaacgattgggcgtcaaagcacctacagcccggcgatagcctagacggtgagctggtgtgtttccgtgacggtaagcgtttgagtcgtaaggactccaacggctttgtgaacaaggccatcaagggcaccatcagtcctgaggaagcagaaatgctgaccctggttgcatgggaccttgaagacaagactctgccctacaacgagcgtttcgccaaggtccagtctttcgaaggcaaggtgcaggcgatcgagtctcgtatcgtccattcgtatgaagaagctctggctcacttcaaggaagctcgtcgcgctggtctggaaggcaccatcctgaagaagtatgatgctctgtgggaaggcaagcgtgtcaagttccaggcaaagttcaaggctgagatcgaagcagaattccgtgtcgttggctttgactatggcaagaaggggactaagaacgagaagcgagttggcgcactcaaggtccagtccgaatgcgggcaggttgcatgtgacgttggcatcttcaaggacttccctgacacgatccgcgatgacatgctgacggatctgccgaccatcatcactgtgcgatacaacgagcgcatcacgtctcgtggtcgcgatacgcagtctctgttcctgccgcgcatgatttcgattcgcctggacaagaacaccgctgacaccctggatgacctgatcaagatcgaagcggcaactctggaatgattgagtcttccgtacagacaagagaaggcgatactatcggtttcgcctatgagattcgtcacggtgaggatttcgatcctcgctgtggcgtgtgtacccagtacacggaatacgtgaacaagattctcggcgagtggctgcctgaggcattcatcgttgaggcggattggttgaacacaaatagttcttccggtctcaacatgcgcaagatgttgatcatcaagagtgggcctgagccggtgctggaacgacttctgttctggctcactaccaactttgatgaaactatcaaactcgcatcaattgattcgattgtgttccgcgaactaagcacacagaatgagtactcctataccattcagtattgacgctgtaacccatcaaccaacggagttgttatgagcattacctttgagcaatttgaagagaagattgaaccgatccataccgcttattgcaagaagtacaatgagcttgctgatctgcgtcgcgagttccagaagctggcaaatcagatcagcctcgacaatgtcgaagatgaagatgagcgcgatgacctgcatgaagaagtaagcgaccgtcttgccgacctgacctacgatttcgatctgcaatgggatggtttcgagcagggtaacatcaacttctgggttccgagtacttgctaatgaccactgaaaccaaaacctcttttgaagcgttccatgaacaagccacggacctctatagccgcctggccttgatcgatcagctgttcaaggaagctgatgctcttgtcaggaacgtcgatcgttcttcattcactgacgagcagctcgatgaagcctatgaattggctcatgaaattggatacgctgccggctggcagtttgacagtttcggtgaaaatggcggctactggcagccttcgacctgctaatcattcaaccaaaggaaatgacaatgagcaatcttgatcttgtgaacgccgccattgaagccggcaagcccctgtacgacgaatactacaagctgcgcaacgttgcagaccagaagctgcaggaaatcctgggtctggtagagtctctcaagctggaccctgaggacaaggatgatgaagaagagatcatcgagatcatcactgacctgggtagccgctttggtcatgcgtgggaaggtcattgggacgtcggcggtcaatgggacgttggtgacgaaatccagtactgggaaccgagcacctgctaatgagcaagaatgaagaattgatgaaggaactctatgagcggacaaaaccgctcaggaaagagtttgacacactcaagttcgctctggataagaagcgttatgagatcgcaggtctcatcaacactctcgaattcgaggagatctctgaggatgatgaagaagcctacgagtctctgattgacaacatcgacagcttcatgagttccttggacttgacttggactggcggacgctatttcgagtggggcgacaaggattggaacccaggtgaagaaattcattactgggaaccgagtaactgctgatgcacgtaatcaaggcacctgttcgtattcgcggtctaccgcagcgaccaactgtctttctggctgggtccattgatatgggctcagctgttgaatggcagactcgccttgagcgcgaactagaatacttcccaggcacgatctacaatcctcgtcgtgatgactgggacagttcgtggcagcagaaggatagtgatcctcagttccgaagccaggttgattgggagcttgatttcatcgagcactccaaccatgttttcatgttcatctctaaggacagcaaggctccgatttctcttttggagtttggctacatcgttggtggtgaacagaacccggacaagctattcatctgtgtcgaggaaggcttctatcgccgcggtaatattgaagttgtctgtcgtagacaaggcatcaagctatacagtaacctcgacgaggcaatcgaggcattcaaaatcaaactggcaagtgatctatgactgaattgttctatccttcgaatctctccaagcctatgcctgtattccttggcggtagcactgcaaagggcgactggcagaagaaggttgtggctgcattcgaagacacgcatattcccttcatcaacaccagtcgccctgattgggatgtcgttgaaccgaaccgtgaacaaaagaacgaacacattgcgtgggaattcaattggcagaagcgagtgctcaatcacttcatctgcattccggcggatgcgaagtctcctacagtgatgctggaactgggacttgcgatttcgtgtcatggtaacgctgtggtgttcattgatccggagtattcgcatttccacaatgctcgtatcgcgtgtgagacctatggtgttcgtgtgttcaccgacttcgatgaagcggtagaaaagttaaaggacttgttcctaacttctcgcctattctgagaaaaacggcataaatactcatatgaaaacaattctcctcacatcgaaaaattggcatcaggttgcagctctagctgtcaagcccgccgacgaacgatatgtggctggatttgatttgaatactgggtacggaatgagttgaaagattgattttcaacttggctttctggacccaggaactgaaaagtttctgggtttttacttagtggtgcgaaaaggttgataagaaaggctgtccatgtagcatatggtttcaggacttttaaacattgacgcgccgaggagcttatgtgaagaacttgtacttgacggtaacaaactttctgttaggctttggcacgttgcagccgttttgggcgacgagttacctactgatgaagttaggaaccgtttcaggaaacatgtaagaaaaggttgtgtagaaaacagtttgatgtaaactacgcaacatgaagtaacaggcgcgcagcaacgaagctgacgcgacgttctttaaaaacaaagattcaagttatacgtcgttagttcaattggcagaacaccagcctccaaagctgggtgttgagggttcgagtccttcacggcgtgccaagttttatgtctgggtagcaaaacggcaaatgcgctggcctgcaaagccatgaggtgcgagttcgattctcgcctcagactccaagttttatatctgtgtgtagctcagtctggttagagtactcgctttggaagcgagtggtcgttggttcgaatccaaccacgcagaccaagttttatcccgttgtatccccagacgctacgaacgtctacaaaggtaactggagtggcgccaaaaagcgctgatgcaggttcgaatcctgtcgacgggtccaaacagttctcggacttaaaccgagtggtggaggatgaactgagaaatcagtgaatcccttgacgagatggagtcattaactcgatcgagaattttgggctgctcgtataatgagtattacacctgccttgcacgcagggaatcggagtttgattctccggcggtccaccaaaacttggggccttagctcagatgggagagcgggtgctttgcaagcatcaggtcatcggttcgatcccgataggctccaccaagtttagatatgccctgttggtggaattggtagacacgcatccttgaggtggatgtgctgaaaggcgtgagggttcgagtcccttgcagggtaccaaacaagactgttcaatcagtcgaacgagttggaaggtcgggttcgaatcccgaagtgatgacgtccggattaggtcatcatttggtgtagtgggcagcacgccgatacattaaaaggttgcgcagaagtgtgcttcatttagactgtgaacacagtcaggcaagtcgatcaaaagacgcgccgacaagcccgaagcgagttcttcggctaagaaggaaagacaccgtttcctacttgtaacgacaagtccctagaggatgaagtctccgttagtcggacgcctgagagtggcgaaaaggattcttcggtatttcggtatttcgggatttcgggttgcaagcattaaggtgatgcaggaggcttttaaccttcagaacagggatcgttaccctggcgacccaccaagttttaagccccgttggctcaattggcagagcagctgttttgtaatcagcaggttgggagttcgagtctctcacggggcaccaaacaaaccgagaagtggtagttaacaactatcggcggcatcgggagaggatgacaagagcgacagtcctcaacgaattttgcgggtatggtatagtggttgtgccctagccttccaagctagagagacgagttcgatcctcgttacccgctccaagttttacgatgcatctgtctgctaattggaataggcaacgatcctttcaagttcgggaatgcgggttcgagtcccgtcagatgctccaagttttgctccactcgtctagtggctaggatgacaccctttcaaggtgtagaagagggatcgaaaccctcgtggagtgccaaattatgcgcctatagcacaactggatagtgcatccgaattctagtcggatggttgtgggttcgaatcctactgggcgcgccaagtttcaaatggataggtgggcgagtggtttatgccagcagactgtaaatctgccgcttaattgcatcgttggttcgaatccaaccctatccaccaagtttatgtgtctgctgtcgggttggaggacggcaccgggctgtaaccccggatcctcaaaagggacgtagtaggttcgaatcctaccaggcacaccaagttatatggttccttagctcagcggtagagcaacgcttttacaaggcgaaggtcgtgggttcaaatccctcaggaactaccaaacgttgaaacaggttgtgtagaaaacagcttggtatacaataagcaacatgaagtaaggtccagaccactgaagagtcgccgggacgataaacaaaggcacgaaacgtcgagaggcacaaaacattagcctcgtgagacgtctggtctagcaactcaattgtcgaaaggcgattgtttaggaatacggtacagtgatgtgcctaatggattaaacgcccacaagcggtccgccagagatggttcctctagaacaagtcgacatagtgcagccgaaaggttggcgtctagtatccctaggcgatatgtggaggctcagtgagacacgagattcaggtccaatgccgaatggtgaggatttgatcgtttagcgacggtagtgtttcggcttagcggcaactgactccaaggacattgaatcggcaggtacgtagttcaagccttagcgggtaagggcgagtatcaggtcaggcggactaatgttcgcactgtatcactcggacgtaggcttagcggctgaaacgagaggaggtcgggtaagaagctgtcgcccaaaaggctatggacttacgaacctgctcgaccttagtgggctttcaactttgacggttaatcaaaactacgaaaaacgcaaagtcaggttcggtcgtaagtgaaagtggcttaatcgttgacacgaaagtgaatcaacgcaatttgaggctcgcaaggctgatgattgtctatcaggaagtgcacctaagaggaagcccctctgaatggctcgcaaggtcaagggaaacgggaaggtagagtagcttacgatgacagaggaaacgccacctctttaaactaggcagccatgacggttaacaatgatgcatcgaaagatggttgttgtggaaaagttgggaagggctccgcaagagctgataatccaaacgaatgaatcgtctcgtcagactgtattctcaggtcgacactttgtttcaaggagttgtattcctcaaacgcttcaattgaagtttttgcgaaatgcaatttttggtcccatagtttacgattggttagaactcccgcctctcaagcggaagaatcgggttcgactcccgatgggactgccaagtttgccgaagtagcacagagaaggtgcggtgctcgtggagagcaacggtcggtggttcaagtccatccttcggcgccagatttatacgcgtgtagctcagtggcgacgataagttcaaagacggtaggcatactgtcacgcagagcgagtcgaggattggcgatacgactgtgacgatacgaaggtggagctcgagatcctagctccgacaataacggtacggtcaacattcgagagcgccgggtagataacccggaggtcagtggttcgattccattttcgcgtaccatataagtagagtagtacaaaagttttatccgggtttagctcagtctggtagagcacgccgtttggggcggtgaggtcgtaggttcgaaccctgcaacccggaccaattagagaagtgttatggaaactttagaaacgaaagtgacacgtctaggcaatgggctttatggatgcaggatcatcaggtcagctgacaagaagccaattgttgaattaagagttgaaaagtctcagattaggaacgctatgtttgacatgctccgaactctagacaagctgggatatgatagtcctatggcacacgcttcgcgacatcgcggtaaggcttgtgtcacagactcgaaatatatctggcattgatttattctggacgcgcctaatggggaggcaccgggctgttaacccggcgatagaaatatccgacacggttcgattccgtggtccagagccaaatatggattacaggccaactggtgtaggcatgcagctgttaactgcagattgttgagttcgattctcaagtagtcctccaaaacaaacggtctattagtctatgggttaagatactggcctgtcacgccggtgtaacgagttcgagcctcgtatagaccgccatagttaaaacgagcatgggtctgctgggtgaagattttgcgttgtcagcgcaaagatgatgggttcgaaccccatatgctcgaccaaattaagaatgatgcgcggtcgtataacggcagtatactgggctcataacccggagatggaggttcgattcctccctgcgctaccaatcaacgggtccgaagctcaaatggcagagcaactggttcttacccagtaggaagtcggttcgatcccgaccggacccaccaaacaatggactcgttcccgtagttggtcgaacggagcggactcttaatccgacggcgaaagcccatcgcaggttcgaatcctgccgggtccaccaaaatgagatagatatgccgaagtacaatttcaagtgtagcgaatgtgagcaccgcggtgatgtctggaccggcgatactgaaaaggtcgacgtggactacaaagacgtagagtgccctggttgtggaaaaaagacctacaactatgctccttgggattcaggtgcttcatctcagtcatggggtcatgtgaagcctacaacactaggcagacagaaggctcctcaggattttagaaacttcctgacacagattaagaaggcacatccaggttcaacaatccgagatcattaatcgaaaaggtgttgtgatgtacgtgtatcaaacatattatgtgtacaccgagagattttgtcacccagacccacttgagtgggaagaaattcgtaaagtgatttgtactacgttggatgagagcttggcgcaagaagttgctgacgctcacaacaaggaacacaacaagatttcaggttacaaagactacgccaccgttgcatgttatgcgttggcaagtcgataaagaatcgccgttcagtagctcagttggtagagcgcccgccacgtagcgcgggaggtcgtgggttcgagacccacttgggcattaaggcgctagggcgaatttaaagtactcacatactagttcgagacagtatcgcccggatcctataattgtcagcaggtaatggtcatgcagaagaaaattgacgtgaaagcagtcgaggcgttcatgcagacgcagagccctgagacaaaagtttatcttggagcagactccgagaaggtaaaaatcaatggtaagatgtacgcggattacaccgtcgtcatcgttgttcacattgatggttgcaagggttgtaaggtattcgccgagacaactcgtgaggaagactacgataaggatccttcaaagccgttcactcggatgatgaaggaagctgaaaaggtagccgagcttcacgatcgtttcaaagacaccttctacgacttcgaggttagtattcacctcgacatcaacccgaagaagacggcaggttcaagtatcgcaatggaagcggcacgtggttacgtcaaggcgatgaccatggttgatcctcacttgaagcctgtagcatttgctggttcttatgctgcggatcgcgctaaagaacttggtatgtgctaagagatatgcccctgtaggcgaattggtatagctactggccttagaagccagcgccgaaaggcattgacggttcgagtccgtccaggggtaccaaatatgtcggagtagctcagttggtagagcggtagcttgaaaagttacgcgtcgcaggttcgattcctgtctccgataccaaaacaccgtcactcaggtccctcggtgcaaaataagggaatactcaggagaggagattgtagtatgaagttgccttcgcgttttcaaatcggtgataaggttctcgctggtcgtcttgatggcgggagcaaaggtgaagtaattggtgtacacttcaaccgatacaaagtatcgtatgatgtggtcgacgagttgacccaacgtacaaagaagcacctcagtgaacgggttcatcctgtcacagagtaaatacagatataagacaatttgcatcgttagctgagatggattagcgcttgcctgaagagctcgagaggttggttcgataccaacacgatgcaccaaacaaaggaacgtgaatgagctttaagccggttaatactttcgtcatcgtaaagcgtagggaagaagatacaacgagtcagggaggcatcatcatctctggatcagttgatcataacctcttcactgttgtggccaagaatgatcttgtgacattcgttgagcccggtgatacggtagtaatcaacattcgcgaagcagctgaaatcgacgatgtgcattacgcagttgatgcaaagcacatcttcaccaaggttgctaagtaagacagttttgcccaggtgacggaattggtatacgtactgtcctcagaaggcaggttttgagggttcgagtccctctctgggtaccaaagtttcagtgttccacgtgtcggaattggtagacgagccagactgtgaatctggagtttgcgggttcgagccccgtcgtggtccccaaagttgatcaggtgattcgccaccttagagtgcgaaattgaaatattgcctgttagctcagtggtagagcaatcgcccgataagcgataggtcgtcagttcgatcctgacacgggcaaccaataagccttcatagctcaaaggtagagcactcgcccgataagcgatagacctaggatcgttacctagtgaaggcaccaaaccgttgacgaaacagcgtaagggcgctaaagtagtacgcaacaaggtattctagttggagccttgcaaagagccggactgttaaaggttgcggcgagactagattggtagcttaattagcttacggtgcatcatatgttgctagggtatgatgactcagaagccttcgggaacccttaacttagctacaaattctatagcccagtcgtttagttggtccaagacgccgtcctttgaagtcggtcatcgtaggttcgaatcctacctgggttgccaagtttgatgcctcttagttcaatggtagaatacagtgctctgaacactgagacaacggatcgataccgttagaggctgccaaatatgggactgtgctgggatagcttcccggacattatgatgtgagtaggttagcctgactagggtgtttggtgcatcaggcaccatctgaaagactaatccaaagttgattgatgcaggtcccaccaatttctatgaaggttgtagctcaaaggtagagcgccgggtgtcggacccgggtcaaagagtatgaagttcgcgcgaactgtctgctcaggtgcaggagtcgaagcctgtcagccttcccactaattgataatgagagacgatgagacagttcaaccttcgtggtaagaagacatatcgtcctggctgtggttgttgcgttgttgaaaacttcaagccagaaatcattgacaagattcacgcatacgaaatgcgtaatccagatgaattcgctctcacagcagacgatttcgattgtgtagaagattttctcatttatattgatgttcccgttgaccaagtttgttatgatagttcacactgcgctcccttcaaaggcaaggaagaaagccaagaagaaggttgtaccgacaaggacgccagttaagaagttcgttgaaaagaaacgacagttcattcccaagatccccgtttaccgtgcagcaggaaccgagcacatccgatcacatggattggagaaggtgccgcctaaactggaacgtccaatcgtgtatcatggcgatatggctgaacgtgaagcggctgctcaagatcaaattgagtaccgtgagcatttggttagaaacgctttccgtaacgggaaggtatcggcatgctacatttcaggatgacctatgaatactgtgattgaaaagactgacaagggtgtgatcaaaggcgcggtgttcatcgtcgccggcgataggcattgggttgagggtaatgtctacggcaaccccaacttcaaggatggcacctatatccacacgtccaagattgttgcagttcgtggacgccgcattgaaaccctgaactcgttctacacttgcgagttccacgttgatggacctgttcgcctatggtaacccaagttcgtattctgattgatgagtgtggtgcacctctggattccattgttgaagtgactgaaatcttggatgatggtcacatcatgtatacctgggaagacatcaccttcatggcttcaccggaagcctgggcattgcattatccggattctgcatatggatatgattctcagagcgctggcacagacatcaactacgagattttgagaaacgccgctgagcaattcttgacgtacgtcgaggaagaaatgatcgacgatgccgccattgattacttctacgacgtgttcaaggaaactctcggtaagtagaaatattggagcgtaactcagccaggtggctgacgctgtttgctaaacagttgggaccctatgaacgggtctggggatcgagacctctgcgctccgccaatttggatttgatcatgaaaatcgtgctgcttgatcttgagcaaactgtgatcgacgactgggagcacatgaacctgcttccaggaaacatcgataagattcgctgggcaattcagcacactggctgtaagctgggattgatgtcctgggctgtatggaatgaggtggacaaagagacgttcaagaagcgcctgcaaggtccactcgaagaagtgcttggtatgaagttctccgaagagcttatcttctctatgcacgacttctcagacatcatccttaagcgacgtcggaaatggcttagccgtgacgatatgtttgacctgtttggcaaggaagagtgtctactccagctgctgaggcttgaacacttcggaaagaatgctcacgttactctgatcgatgacgtggtcgatcacaacatggaattcaccaaaggcgctgctaaggtgcgtttcatcaatgtagatgatccaatgttcaagcattggaatatcaatgaaactgtccatgactatggcagttggagagaatgatggaagaacttgctcctcagaaaggcaatatgcctgacagcttcatcctcgttcgtacatctgcaggcgttcatgtgcttggtggttggagcggtggctatctctacggcgatagctggcgtctcagcactgcattgaagcgcgtggtagagttcgatggtgattgggtagttgttgaaacaagatcaggttcgacctatgtcctaccgacacaagcagccattcgccgttatactttgactgtgacgacttcgggcgtgttcaactcgttcgaccgtcaggcaaaggaacaaggaatcctctttgaagcgattccggaatccgaattcaacgatgtaatcaaccaactggaaaattgatcatgagcaatgctaagctgcaacgtctggaagaagagctgtatgaaaagctgcgtgagattcaggatgtcgctgtagagacgaacaccccgttctctttctccatcaactaccatacctatgatgtgttcctcccggatcatgaagatgaagacatggtagaatatctgaaggaagaagttggtgttgaagttggtgattgggtcagctctagcgatcgttgctaatgagcattgacactgacctctatgagttggtggaaggtagaccagacgcagcttccatgctcgtctgggctgcatcactgctcgggctaaacgccgttcctgattccgaagaagttgaagctgcaattggtatctttgaggatgctcgagagcatatcatcgagaagcgtgctaaggatcgtctgaccgatatcgttcgctacattgtcccttctcagtacgataaaaaatgggacaagcgcacgtcgaagcatcctgacattcctcgtaattggtggaatggagcattcgtcaaatcgttcggatggaccaaagacagcttcattgtcgaagttagttcctacgtcggcaacaacgagtatgatgggacaacgattgagattcctcaacatctcgctgacgtaaagaacttcaattggaacctgcaagataagattcctcttattgacgcattcctaaaagcagccaaccgctaaatatcacgtaaggattgttaaccaaccggggagttggcaccgcttcgaaagcggtaggtgcccgaaagggcatggggatcgagacctcagcaatccgccaaacaatggacagtaaactagccggggagctagcgccgacttgaaatcggtaggcacgtaatggtgtggggatcgagacctctgctgtccgccaaattaaaggatgatcatgagtcgtttgaagtatgatgaagtgccgtatcagaaaatcaatccaggtgatcgttgtatcgtaatgaccacttgtactgggcgctcttcaatgtggtcagcaacctacttgggtcagcgaaaaggtcggtgcgttgtagatattgatgattaccaccgtcgccttgttgatcaaaacgatgtagagtatgattggcgcgccgagagtcgagagatcaagtacccaccctacaaccgagccacatacgccgaagatcaagctgcataccgagctaagatcgaagagcgccgtaagggttacgactacaagaagttctactatgtgcgtcgctcgactcttcagaacaacaatgtctatcctgcggatatggcactgaaagatttcaagctgtaaatagaacatatggacagtaatctggcttggtagtcagcaccgcttggaaagcggttggtaccgaaaggtatgggattcgatttctctgctgtccgccaaacaaggcgaacgatgatttacgttgtatttgatgatacgtatcgcggtgcacacaaaccgtttcattcaattgaggcaactcaacaggatgcagatagggtggtgcatgatttgagagaaacaagcacatcaacatgtgcaagaacactgatcaaatggaaggcatttgagtttggtcagacgtttgaactacctaagcccttatagcacagtggcagtgcacctcattggtaatgaggaggtcgtcagttcgatcctgactaagggcaccaaataaaggaaatggatatgactgatacgacaagcttcactgctgttggcgaaggttaaaaatctgcgggtataattcagtctggtagaatgcttgcttgccatgcaagtcgtcgcgagttcgaatctcgctgcccgctccaagatgtcaaaagccagggctttaatcggtcctggctttttctttggttgaatagaaacagtctacctataggataaagcaatgaacagacacgacgtgaaagaccagctcgaagacctgtggttcgatgtgcgccattggttcaagaacctccgcctggaaatcgacacccgaatcaacccacgccagaagtggttgacgaaagaaatcggtcgccgtttcgtcgacaaagactacatcatcgagacgaccatcttcgaaagcatgatccacttctgggaagaggacgatggtgaaaggtcgacccgctaccagttcgagcactacgaaggaccgtgcggtggtaaggcgctcaagcccgaagaccaggaagcctacgtacgccgacgtaagctgtacgctgacctggacaagtgctaccgttgggctaagacgcgtaagggcttctgggcagactgctacaccaactacaagccggaaaacgagaaaaaactcgaagccgaagacacgtactatatgaacgaaatcatccgtctccgtaagcacatgtggacctaaatgtacggaatccctgaaaactaccggcgggtggcagaatctttctatcgcccgcatggttgcaccttagatttttctcaaaaggcattgctgcaagctttcgagaaagaaacctacggcgttgaccacgacatgtcgaagaacggctgggcttttggcaagaaagccttcgacatcactgtcgcaagttggcgcgaagatcttgcagaaggtcttttctgcaagtatgactacctccgagactatgaagaagattcgttcgagtatgatttcatctggaacgtgatcaagaatttttcttcggcaaggctgttcacttactgatcttgttctatccaggcatcctgcatatcatatttgtgtagcacttatacacctttgaggaaatgataatgagcaacgaagtttgcgtgaagttcccggcgcacctggtgcagaccgtccacgacggctacctgtacgatcgtaattcgcgccagctgttctcgttcaagtctggcaagttgaagccgatcaagcaggtcggttgctaccaggcaaagaagtcgtacggtgaagatggttgggctgtctccgtcagcggtaagaagaagttcatggccaagaaggagctccagtctctgtatccgacggagtatcaggttccgtttgcatgagcttcgttatcctctactgggcaggtgtcatcgtcaccggtggtgcctgcattttcggactctaccagatttggaagacgaagacctacacgccaatcggtttcgagcatgatgcaccagcgacgctgggttctttccttctccggatcttcctggcaatgctcgccacctttgtaccaatcatcaatgcctcactcgccatcatgattgtattcttggcagcctacatcgcgatcgcggaaaagtttggtgacaggattctcaaagtccttcggagacctctgtgatagcagctttcatcatcttcacgcttttctatggcggtcctgccttgattgttggaattcctggattcctcaatgttcgggcgatgatcaaggacaaggtgttccgagactggatcgaccattacgaaaaacggacaactcgtggtgatgttctggggagagcctcccttcttgttcttttgactttcttgccagttttcaacattggctttgcacttttcgttgtaataggatggcttcacgctgcctggtacaaattcttcggtgaatggtcaaggacacctgtataatggaagcgattatctttctgattgtctacctcatttcgattccgtttcctgcctatatggcttggaaagaagttgatgaggttcgtacaacaaagcgaatcaaagacatccataacttcttctatcgcgatgccacgcggtgggatttgatctggacaggcatatggtgtggctttgttgcgatgctgccactggtcaacactgcgctcaccattggtggagctttggtttggatctttgagaagctttgggcaaccaaattcattgcatggatgaaaactccgctatgagcatgaacacaattccaacggaactgatcgcggttccgaattacgatggctacttctggcatccgggcgaagagcagttgtactcgctcaaggtgaccggaacgcttaagccgatgaagtatcatggtgcgagatatgtgccaaagctgtatcggcaaattcctgcatcgtattccgtatcgcgtgctggcaagaaatcaattctgaccaaggaaacgctgcggaaaatcacacaacagaaatacgaggtgccttatgaaagtcggagtcgcatctgatctccatctagattttgcagatatgaaccccgagttcttccagtggcgtggcgacctgctgcttctcgctggtgacctcggtgaggaagattatctgcggaagcatggtgctgagttcttcgatggcgtctccaagatggcggagcaggtcttcgtcatctcaggcaaccacgagttttacggctctgagctggatgtagcggaagaccacctggacgtctatctggagcagtggaagaacatcatcccgctccgaaatgaggtgaggtcgtttggtcaccttgatgtctttggtggtacgctgtggactgactatcacggtagtcctatcgcggaaatggctgccttcatgggtttgaatgacttcaagcaaattcgcatcaagaaggcaggttaccgaaagatcacgccgcgcgatatcctgatcgagcatatgaagggaaagaacaagctgctggacttccttgagaagcctagtggtggaatcaagttggtgatgacccatcatgcgccttcgatgcagtctgtgccgaaccgttttcgtgctgattacgatttgaacaaagcgtattgcaatcactttgatgcgctgatcgagtctttccctgatctcagttattgggttcacggtcatacgcacgattacatcaactatactatcggtcagacggaagtgatctgcaatccgcgcggctacccagctgagcgaccagcacatcttccgccatatcaaccaagggatattttgctatgaacatttttatggggtcctggtctgaccgtgaggatatgatcgcggatttctgccactatgatggcgaaggtcgcgagcgcgtcgaaaactatcttgatgacgctcagatcatccttgcatgttacgagagctctgggtacgaaggctccgctttcgtcctgttccgaaagtggggaaagtattacgaagtgaacggtagccactgttcctgctatggcctcgaaggacagttcgaacctgaggaaaccaccatcgaagccatcgcgcatcgtctggagcatgggaacttggggcgtgagtattcttacaccacgagtagctatactcagaatgttttcgcggatgaactggaagaagcaatcatgaggctggagaagatctaatgagcatcgttgaacaactcgctcacctctgcgtgtgggcaggcacggataactaccgttggaagatgaagcaggtcggctggaccggttggtccgtcgacggtctcaaggaaaagcctgccgccgaggaaggctacgagaaggagtaattatgggcggaaacgcttttgataaggcagaacgcctgacaccgcagttctacaaagatgtcgtagacgatatcaagtggctcctgcggaacatcatggggtatggctccggcttctctattccgcattctgtgcggaacaaggaaagctacggcgacgtcgatgttctggtggcaagctcacagatgcaagctgcactcaaacagatgaagaacggcttcaatgtcgttggtgaaatctcaaatggttgcggctacaatctcctcgttcacactgatggacagtacgttcagatcgatttgaacaaaaccaaggatgaggacatggaatttgcgttccattacttctcttggaatgacctgggtaacctgattggacgtatcgcacatcgtcaaggtctgaaacatggtcacgacggtctgtggtatgtgcatcgtgatggtgaccatcagctgggtgagatcctgctgaccaaggactacgacactgcgctgtgtcatcttggctttgacgtcaacgatttccgtgcaggctttgattccttcgaacagatgtttgattgggtcgagcgttgcaagtatttcgagccgagcgcattccctcttgagcatcgtaaccatcaggctcgcgttcgtgatgcaaagaggaaggtgtacaacctgttccttgagcgactcgccttcgatggagactacgttccttcggacaaggaaaagcacctcgagcgccataaagacaaatggcctcacctgagaagcgagatcctcttcctgaattgtcagaatgctgttcgcaaggaagtcaaggctaagctcaacggtaacatcgttcgagagttgactggacttgatggaaaggagttaggtgagctgatgcagattgtgaagcggatgctacctgaggacaaggtatacagcatgttcccagctgagattgaggaagggatcatggaggcttttgaacgttacaaggtagagaagaatgcgactaattcttgattggactaatggcgagtatgatgacactcgcacctgggttgaaccggtagagtttgaatccaaggaagtcttctttgaaaagctcgaggctaagaagatcgagtacaaggaaaatcgtgacaagcagatctctgtccgtgagaaatatgtgcggaaagaaatcagctatgacgaatacttcgagcaactggacaagctcgacgctgtgaatatcgtcgatgacaaggggcgtgagttcttccttggtgatatgatttacatgggtcactgggatccaattactgtctacaccgttgatgaatggtacggagattgatatgaaagagaagtcgaaggaaaagctgaaatactacgctgtgtctgcaaagacggaatcgggtgatgactatctgttcctgctcaaggcaaagaatgctctggatgtagccaaccagttctcggtagctatggatgaagagctcggctacgtctactacaacgctgttgaagccgaagatcctgaggacgctaaggctgccaagaaggccatcaatcgtgcaatcgaaaatgcagagattgactgaggcactcaaagaatttgcctatgatatgctctatggtgttggatgcatcatagagcttctcatcgactgtgcaattggtatctgggaagactgcgtacgcaaagggtaaatactgtggatacatcacacaggacattttccaatgccactaagtttcttccccgatgccgttcctaccgcgatcggctgggcacatccactgaccggcgaacagctgacggcaggtgctattccagcatctcagcttgatggcgataccccggttgatttctacaagccaaatgccaaggccaagtctttccttgacccagctggttctactcgtaacctgatcaaccatgttgctcacggcaagcgagttgagtttgcagttcactccctcgacaagattgcctcagtggcatggacgttcgggggtgcagctgttgctagcgtgaacgttacagcaggtggttctggctataccagcgcgcctaccgtaacctttgcagcaccgcctgcaggaggtgtgcgtgctaccggtactgcggttctaactggagcagccgtcactggtgttacgatcacgaacccaggttctggctacactgctgcaccagcaattacgtttgcgggtggtgaaggtacaggtgctgcggctactgctgttcttgctgccaacgcagctgttacaggtggagctgtccagcagaaggtcttccctgcaggtactcacagtgtcaaggctgttgtttcgtatgtcggtggcaccccagccaacgtcacgttgaacacctcggtcaccgtagcctaatagaaagaacccgtagcggcgaaagcttctacgggtttttctttggtgttgtttcgtcattgatgttatatcatatagtcatgaacacattctttatttctgatacgcacttcacccacggaaatctgatgaagcattaccctaatgggcgtaatcgtttcgcagacgtggatgaactcgatgaacacatgatcaccgagtggaatgctcgcattggtcgaaaggaccgcgtgtatcacgttggtgacttcggcggatgggacattgaaaagtccaccaaggttcttcgtcgcctcaatggccagaagttcttggttccaggcaaccacgacaagaagcacatcaaggacgagaagttccgttctcagtggtcgatgatctatccctattcgtatgctgagatcagctgcgaaggtcagccgattgtgctgtgtcacttcccaatctgggaatggatgcagattcatcgaggctggtggcatattcatggacacgtccacggcaagccgactggcattcctggcaagattctcgacgttggagtcgatggccacaacctgttaccatggtcgtgggaagaagtagttgaacacatggcaaaccgcccaacaaggacacatcatgagcactgaaatcgaactgctgtttgaaaagcttgaccagatgggcatgcgcctgggtggtctcactctgggtgacaatcctgaaaatgctgagaaggtagctcgcgaactgcgactgagcctcgaacgtcttgaggatgttggtctcgaagaaattaccgacttcgactgcacaggcgaaccgactcaggaaaagattgatcgtgatcgccgtgctcttgctcgtatgcagaagcgagctgacgacatcaaggccaagacccgcgatctcaagcgtgagctgggcgaggacctgatgaaatatgctgaagaaaatcttcgcccctattcctatggcaaggcaggcattgaagatgccgtagacaaaatcgtcaacactgccaacctcaatgattacgattatgaggacggctatagtggtttctggcttccttccaacttcggctgctaaaggagaatcaaatgccttactcgattcctatgtatgaaagtgaacgcggctggggttccaagattgatggctatgctggtccgtttccgacctacgaggaggccaaggatttcaagaaggcctacaatcgtaagtacaataacgaagcccgtgctcctgactactacatcatggcaatggatccggtagaaaccacaccgactatgaagcatgactaccgatcaactgtctgagcatgtcgtactagacaaagcttggttcaatcggttagttgagttcatcggtcctggcgccctcacctacatggcaagaaacatgcctgagggcgtcgttaccgtcccattggatattgatctatcgaaagttagatcatagtctaagcaactgtggacaccgactttctgattcctgtataatgctttggtagcacgattcattaaaagaaacttcaaatagaaagaaaaagtagaaggcatgaaaacaatcgaaaagcagtttagaaaactgtcagaggtggaacacgttctgcttcgtcctggtcggtacatcgggagcattacgtcccacacttctgtggaacattgtccgacttcgggaaagatggagcagcgtgagctgactttcaatcctggattcctcaagctgttcgatgaagttgtctctaactctgtcgatcattcgaagcgaccggaaggcaagaatctcgataccatcaaggttgatatcgatcactccaccggtgagatctctatctacgacaatggtggtattcctgtcatcaagcacaaggagtacaatcagtacgttcctgagatgatcttcgagcttcgttcgggtagcaacttcaatgatgctgacgagtcgatgctcactggtcagaatggtgaaggtgcagcactgacgaatatcttctccaagaagttcactgttgagacttgtgacggcaagtacaagttcaagatggagttctcggacaactctcagactcgatcgacacctgtggttcgaccaggttcgggtggcttcacaaagatcacctatcagcctgactttgaaaagctgggcatgaagggcattgatgaagggaacattgcagttctcgtcaatcgtgtctatgagattgcagctacgaattctcacctcaaggtgtatctcaatggtagtcgcatcacgttgaagtccttcaaggattacatcgagatgttcacacctgagtatgcctatgacgaaaacgaacactggaagatcggtattgccagtgctgaggatgggttcgctcatatctcgttcgtcaatggcactcgcacaaagactggtggtagccatatcgactatgtggccaatcagatttgtacggaacttcgtgctcacatcaagaagaagcacaagatcgacgtcaagccttcggagttgaagcagcacttccgactgttcattgatgctcagatcgtcaatcctcgctattcgtctcagacgaaggaagacctgatcactgaggtgaaggacttcaagacgagctggaccattgatcagaagttcgtcaacaagatcatcaagtcgacgatcattcagtcggtgcttgattgggcggctgcaaaggctcatcaagaagagatgcgcgagctccgtaagctcaacaaggcaacggacaaggctaacctcaagcatattgcgaagttcaacgatgcgactgaaaagaagaatcgtcatttgacttcgctgttcctggctgagggtgactcggcagcaggacctctgcgcggcgctcgtaatccgaagctgcatggcatctttgctctgcgtggtcgaccaatcaatgtgtcggcagcacctctggcaaaggtcaaggagaacgatcagttcgagaatgcacgaattgtcgttgggttgaagtacggagaagctccggacttgaacaatctaaacttcggacgtatcattgtggcatcggacgctgaccagttcggtcactccattgctggtctggtagtcaacatgtactaccggctgtggccagaccttgtcaagaagggcaagatctatcgtctcgtcactcctgtggtcactgttgactacaagaagcaggatctcgaattcttctcgatggaagagtttgaggcatggcgtcttaagcatcagaacgagaaatacagctacaagttcttgaagggacttggctcgtcgtctccgaagcagtggaagaagtacatggacaatctggatcgttatctggtgcagttcacgttcgacgactcggcaaaggaaacgatggacctctgcttcttgaaggaagctggtttcaccgacaaacgtaaggcatggttggatctggaatgagatttttcgaagacgatagcaattttgaaacgaccccggcgaatcagtcgggggtcaccaagctgcgagtgaaggacttcctcgatcgagacttcaaatcattctcggaatacgattgtcagatcaacattccgaacatgattgatggtttcaagatcagtcagcgcaaggcagcctatgtcatcaaccgaacgaacaagctcaacaccgttgagcgatattcggcgcaggtggcatcggaaacagcataccatcatggtgcaggcaacctggaaggcgtcatcgttggtatggcgcagaacttcccgacctcgaacaatgtcaattggttcgttccagatggaacgttcggtaacatccttgaccacaaggcttcgtctggacgatacatctcggttgaaggctcgcccaacttccgaaagtggttcagtaaggacgacgacctgatcctcgaatacgagtttgaggatggtgaacagattgagccgacgttcttcattccgaaggttccgacaattctgttcaatggttcgtcgggcattggtaccggttactcaagcacgattctgaactacaatcctgacgacgtcgtgcgcaatgtgctgcaggtcgtcaacggaaagaagcagaccaagctggttccttggtatcgtggttggactggtgatatctcgaaggctgatggacagacgactttccgtggcaagtttgagcgtgtcaacaccacgaccattctgatcactgagcttccggttggtgtcgagcaggagaagtatcagtcacacctgtcgaagcttattgataagggctggatcaaagactatgacgatgactcgacggaagaggctggttggaagatcactctctacacgactcgcgaatggctcaaagcacaaaccgacgaagacctgatggtcaagttgggtttgatctcccgtgagtctgagaacatcgttgtctgggatcacaagggcaagatcaagaccttcgacaatcctgagcagttggttgagtatttcgttgaggctcgtctggagttctacgagaagcgtcgtcagaagctgatcgaggcaacgtctgagaagatccgttggctgagtgagcgcatgcgcttcattcttttctatctggacaactcggctaccttcaagaacttgaagaaggatgctttggtagaactgttgcagaaaaacaagtttgccgattacgatcgcctgttgcagatgcctatctggaacttgacgaaagataagatcgaagaactttcgaaggcaacggacaacgaaaagtctaccctggttgccctcgaaaaagatacggcgaaggacatgtacgttcgagagctgaaggaaatcaagtaggaacttgttctttctgcatcgaaacaatatcatagttttacggtaaccaaacaggactttgtgatgatgatcaggttggacggcgcgaaggttgcattgatctccgctgccgtcgctcgtgttgcaggtagtgaagcccacaagttcgtcattgacgagcatctgcgggcgatttcctctgccgttggcgccgaaggcgtctcggtgtatgacctgggcaagcggaacgaaaagactcgcttcattcgtttcgacttcccgcagggtgaacagatcgaaatcgaagtcggtccgcagcctgagttcgtgaaccatgacaatcgccccgaaggcgatgatgacaccccgggcggcacgcctgttgcgatgcggatggcagcatgatcgagatcatctttgggtgggcgcttcctgcgctcatccttctcatcgtaggtgggtacttcacctggaagaaagcgaaggaagacattctgtactacgactgtcttactcgcgggacgctgctgagaatcccgttggttcttatcgccgccgcgtttccgggcatcaactgggtggctatcctcttcatcgtagcctgggcactcgctgtgtatgaacgccaaatctctgacttcttcagagagcctgtctgcggaaggaagaagaaatgagcatctttctgttcgcactctgggcattcggaagtctcttctgtctcgcctacctgaccagcgtagctaaagaccacatcaagcactacgatttgacggttggcgacctgggcttcttcggagtgatgtgcttgttggcggtcatcccggtgtttaacttgctggcaggattcgttatctttgccgagtgggttgaggtcaccttcggacccaaagcaaagcgcatcatcgatttcatctccaaccacccgatatgggacaaggtaatctttgtctcgaaagaatccaacaagaggtaataccgaaatggctgtgaaagaaaagaaggacaccaagacctacgttggtgcacgcatctccaccaagcagttcaagcgctacctggccactgctccgacgccggaagcgaagcgcgccatcaagtcgctgtacctgagtgagccggtcaagttctacagcaaggctgacctggctgctgagaacgaaggtgtcgaaaccgacctgccggtcaaggcgaagtaagaaatggccatctccaagaagcgcatcgctttctggactgtggcactggccttcggggtagcaatttcgctacccctgggcgccaacgcagaacagccgacccagccgaagccggttccgtcgtatgtccaggccaacgtgaatcagttcaagttcacgcagattcctgatccgtcgaccaagggcgagacttcggtcatccgtttcgtcgactacgaactgcgcaaggtatgctacatccagaagatgtatgtctaccatggtggcggtccggcaatgagctgcctgccgctatgaagaagattcttctcgcagttgcgctgatgatgcctctgtctgcaatgtcacagaacatcatcatggatacgaacactcagatgctgacccagtcgatgatggcgtctgcaaatgagccgagccgaccgaagccgacggcgcacaccttctacaaagagcgcgtgccaggcaagcccgaagaaggttttatcccggtcacaagaaatgcgcctgctgtaaactatgtgcaggataaggtaagggtcgaaggcaagacgatctacatgttggatgatagggctaagggcatcaagtgctacttcatcacctatatcgccgagcgtgaacctgcaatctcctgtgtgaagtactaactcaactctggaaaatatatcatgaaccgtgaacgtctgatctacatcgctgagtggctggaagctggcgctccgcacaagggcaaggtgaagggcttcgacatttccgtcggtgtgcaggcgctcaagagcgatgcgccttcctgtggtaccacctgctgcattgccggtgcggctacgcagttcttcaacgacgaagatggcgagctggccaacgccgcttttggcttcagcgagtggcaggaagatgatgccaccaatgaagccgagtgggacgctgtcttctatgaagcacaggaccttctggagctggatcataaaaccgcagtcgaccttttcattccggtcggtgcaaccggtatctacgctgaaggcaccaactggtcggatttcaacgacccctacaagaccgcacgcgtcatccgcaatctgctggagaccggtaaggtcgactggagcatcgaataatgaaggcaactctgaccatcggtgtgtctgcctcgggcaagaccacctgggcgctgtctcagccgggtgaagtgctgagccgcgacaactaccgttggtccatcatggaagagaagggcatctcgccttcctggaccaactggaagtggaagtgggaaaatctggtcactgaacgcgttgatgccgacctggcactgtgcgcggctcagggtaaggatatcatcatcgccgatacgaacttgaacgagaacgttcgtggcgcgatggctgccaagctggaagctctgggttacaccgtcgaatacaagttcttcgatgtgacttgggatgaagctgttcgtcgcgacaacgagcgtgcgcatggtgtcggctattctgttctgcagaagcagcatcagcagttcctggacaaccatgttggtcgtctcgccgcagactctgacaaggggactcgtaaggctgccatcgtcgacattgatggaaccgtggctctgatggaaggcgttcgtggaccgttcgagtggcacaaggtgcacctggacaagccgcatactccgatcatcgatatggtcaagggtctgatggcagctgggtacttcatcctgttcacctctggtcgcagtgatgaatgcttcgacctgaccgagaactggctgcagagcgtcttcgcccccgatggctactggcacggcgactgtcgtttgctgatgcgcgaagcttcggatcagcgtaaggacacgatcgtgaaggaagagatctacatgcgccatatccactacaactacgacgtgcagatcgttctggatgaccgtccgagcgtgtgccgtatgtggcgtgacctgggtctgaacgtcgtgcaggtcggcaatccctacatcgagttctaagatgacggacgccgaaatctataaggcggtaatggcggagctcaaggcagctccgttcattacaaccaatcatgcactcacgacaacgaaatttgcaacgttcaaattcaagaagcgttcgagtgggtactacctcaacgttgacttgcattcatggccttcggagcacgagcgagtacgcaaagaattcaactcatggctttataagaagctgaaaccctatggttgggttccctacaccacttccggtggctgtggcgagtggacctaccgacttgatggaggaatagaatttgacttcggaccttaaaatcgaatcaatcaaaaccgtttactctgccctgaacattcctttcccggaaggtcaggatactcacctgtatggtgtgctgaatgatctctgggaaacggctactacgaccgttgacgtcgaagcagtaaggcagcagtcttggcaggaaggatatgatgacgcacgcgaagatcatgcgtgggacagttcaagctgttgattgacctatccaggtcaaagatgtagactgtgagtgtggtagcggtaacactttattattggagtacgtgatttagatggcacacgaaattactgaacgtgcagacggcacgagtgaaatggcgtttaccggtcctcgcagcgcagtttggcacggacttggtcagcaggttgatgaaaatgcttccttcgatgattggaagcgcatggcaggtttggattgggaagtacacgaatccaccgtcgattacaccgcagtgagtgcaaagggtaagcctgagaagcattcgattccggacaagcgcgttctgttccgttcggacaacaaggaagctctgggcattgtctcgaatgacttcaagatcgtgcagcctgatcaggtcattgagttcttccgagaccttgttgaactgcatggcttcaaactgagtactgctggatcgctcttcggtggtcgtcgtttctgggcacttgcagatgttggcaagagcgagaacgttatcgacaaggatcagattgacggacatctactgctgacaacggctgtggatggaacgatgtcgacccaagcgcgtttcacctcaacccgagtggtttgcaacaacactctgacgattgctctgcaaggtgcaagctctcgccctgtaattcgtgtgactcataagaaggactttgatccgactcaggtcaagatcgatctcaagctcatcgacaagggctgggctgacttcatgaccaatatgcggaagctggcaaacaagaagatgtctgctcgtcagactcgagagttcttcgaagagcagctgtacaatccagaacgtcgtgcagacgaacagacctggggcgtgaaccgcgaagtgacgcgtttgaccgatctggctctgggtggtagtgggtccggttactccaagggcacggcgtacggtacgctgtgtgcgattacggagcactttacacacggttccggcaagcgtgatccgtctcgccagttctgggatgcttatgtcggtcatggtgactcgaagaagcaagacatgtatcgcaatctgttgaaggttgcagcctaaggagaaagtagtgagcgaagtaaagaatgtttctgtaaggtttggtgtacctttcctgcctctgttgacactgctgttcatcggtcttaagctgggtgagatcggtgtcgtcgcaggctggtcttggtggttggtctgggcgccgctgtgggttcctgtagcactcgtgctgggtatctggggtctgatcattggcctgggtgcaacggttgttgttggttcctatctctatcgtaaagccaaaggaaagaagtaatccatgaagaagttctttgtagcaattctgatggctgctgttctggccaccactggttgttctgtggtttcgcctgatcctggtcaggaagctgttctggtcgccaagccaatgatcttcggcaccggtggcgtgctggatgaaaccgtcaagcctggacgcgagtttgtggcattgaccacagatgcgatctatgtggacgtcactccgcagaacatccctgtgaacttcgacgacctgtctagcaaggacaacatccttctggacttcgagacgaacatccaactgcaggtcaggaacgcatctcagctctacaagaccaagggtcctgaatggttcaagaacaacatccaggctaactaccgagccattgttcgcgatgctgtcaagaccaaggacatgaatgagctgatgtctggccaaaagacggctcaggaagtcgatgccgacgtgactgagaagctggttgcactggtcaaggaaaagctgggtgacaatgtcgtggtgatggatgtctctctgggacgtgccaagcccaacccggatgttctgcagcagatgaacctgacagctgccgagcagcagcgcgccaagacgatggttcaggctgaattggctgaacaggctcgaaagcagcaacagattgctaaggcagacgcagacaacgcatatcgagacaagatgtttctttctccagagcagtaccttcgtctccagattgccaacatccaagccgatgcctgtaaggcaagcaagagctgtatcgtagcgccgcctggcacttcggttctcgtgcagtaagaaaactttctgcaagtaggagaagccacagaaatgtggcttttcttgcgtcaatcgagaactttctgacctacgaaaaggttgttccagaagtgcctgatctgtagactgtgtgagtggtaaacagttccgaaaaaacaaatcactccaagaggttccgaaatgtctgagtatgtcgtcgttccgcaggtcaagggtctttcgaaggtgccggcttatgttggcaaccgcgtcgatggctaccagactgtctacctgaccgtcggaaccaaggtgaccaacgtctcgaagttcccctatgaactgaagaagttctacggcacgatcgacggcgtggtccacgtcctctggaaggactcgatcaagcgcgctccgcgtgtcaagaagggagaagaagaatgaaccgctggtgcaggttcttcgccaccctcggtctcggtctggccattgcaggcgggttgactggatgcttcgagcattcgccgccacaagaagccagctatacccagaacggcattcaggtcgagaagctgttcgtcaaggacggatgcacggtttaccgattccttgacggcaacattcgctacgtctactacgcagattgttcgcattcggcgtcggtggcatacgaagagaactgtggcaagagctgcgagcgccccgtcgtgaacacttcatccaaggaacagtgatgcgaacctaccataaagacggcacccaggcagcaccggacgagattttcgtcttcggcagtaacctcgccggtcggcatggtgcaggtgcagcaaaagccgccctacagcactatggtgcgaagtacggcgaaggcgtcggtgagcatggtcggtcgtacgcaattccgaccaaggatgaacacatccagaccctgccgatcgaactgatcaagccgcacatcgacgaattcattcgtcaggctggtcacctcttcaacacccgtcggtatttcgttactcgaatcggttgtggcctcgcaggctataccgacgagcagatcgctcctctgttccgcgaagcgccgtacagcaatatgagcttcccggaagagtggaaaccctatctcgaggactgagaactgttatgcagaagttgatgcgcgaaggaatcatcattgacaccaagcgtcggcaggagggcaatctctccatccaggttccgcctgtgccgtcagccgaagaacgatacggtgactactgcgccaaactggcggcacgtggattgaccccgaaggtgaacagcttcccgtgggcgtggaagggaaagaagaagcccaagactttcctcagcaagaagcctaagatgcgcaagcgtcgcatggagacggtaccggtatgaacaaagaagaaatcattcaaaagttgggacgtgcggctgcaatcgatatcatcctgcagcgcgaactaaccgaagagcaactccagctcgttctcgaggttatcgaaatctcgatggacctggcagaggcgaacaccctcaaggcaattgaactccggaacgcagcgcaatgatcgagcacaagaaagatatcttcttcaaaggcatcatgatctttgcggtcttggtgtgtcattctgaccaagagacatatactgaaggcatggtgtaccgcgacggttatatggctgcggctcggaagttctacgaacacttcggctacatgactgccaaggaaacccgtgacctgttcggcactgacactccggtctggcctgaatggatgacggaagttttcatggaagtggagcgccgagttttcgacaccaccatctgggacaagcaatgaaaaagattctctcaatcgctcttctggctctgagcctcgcagcatgttcgcgccaggaacttccgagcccgccagaagctgcaacggcagcagcaggcgaaaccgtcacctcgccttggacgaacaaatcgtttgagcatcgcgtcgaagccttctcgaagccagacaagtacggcgtggtatgttaccactatctgtacggcgaccaatccctctcttgcatcaaggtgcagtgatgaaccagcaagaagctcttgagaaattgatcgaagccgctgaccatgcctacaaggtctttctgagtctggcagaacgcggtgaatatccgcaggagcttctgccctgggacggcgaaggcaaagacagtccgttgttcatgggccatcaaggtctgatgttcttgatcaacgcgatcaaggatgctaaggctgtaaagcagcctcaggctttcgttgcagacatgaagacttccgccggcatggaatactacgtcatgttgggcacaccggagcggaacgaatcgctcttcatgttcaagagccgtagccgagcagagttcaccgctgccgaagtcaactattcactgggcattggcccgcagcccgacgtactggattacgaagaatgagattcgatatcaccactcgccagccctacagctaccgaacccgaaaggtaggtttcttctgggatacctacgacatcgtctacgatgaaactgtgatccgcgaagtgaaagacgagagtcttgcgcgcgaagtggtcgtgcttctcaactgtgcctatcgcgagggtcacatccaagctcagatggaggcgatgatcgatgcaaattgatcttgacaagccgatgaccgagctcaccgtacgagaatacgcctggctgttagcatggcaggctaagcaagtgacgggaatgcctacaggtgaaagggtgcggtggatggcagatgtggcgatcgcagacctggaagattctatcgaaaaagagatgaaataatggacacgaccttctatcaagaagctatcgacgcacttggcaactccgagccggaaggcttcgatggttgctcaggcgttggtttcatcgacggttgtaagcggatgggctgccacaacgaagctgacgaggccaagttggttgccttccgaaaggcagcaatcgagcaaaaattcgtaggctgagaaagccaaacaccgctgtataatgcttcgacacactttgaaaaggtaattgatcatgacctacgccgcacaagctgctaccgaactgctggacgctctgcatcacgcccacctgctggaaactcgtcagcgagtttacgaatcgattgcggatctgcgctatgcagcacgccacgaagtcgaagtgatgctgccgactctgaaggctgagatcaagcgcatcggcaaggcgctggaagatgctcgcgagcgcgggctgaaccatggcgacgtgatctacgatgagctggttcgtaccatccgtgaagtgaaccacgctcgtgctcacaaccgtcagcgcatcaaggacctggcactggatcaggcaatcaacaaggctgctctggcagaactcaatcgtgagatttcctacttcgaggctgagggtctcgaactggaagtcgagcagatcatcaactaccactgaggaacaagacatgttcggatctcttctcaaggcagccgtaggcgttgccgtttcgcctatcaaggtagcagcagacgtcgtcaccctgggtggcgcgatcaccgaccgtcgtgagccgtacaccgtcactgctgttcgtgaagtcatggagaacctggaaaacgctaccaagccggatccgctgcggtgaccgcctctgtctgggctagcaagccgcatcgcgaagacctctacgctgactgtctcgaccactggggtgcacctgcccagaccgatatgctcgtcgaggaacttgctgagctgatcgtcgcggtgcagaagtacaccaagcggaaggccacctacgacaacttcgatcacatggctgaggaaatggctgatgtgattttgatgatcgaagagatggcattccatttcaatcaggaaggtcacgcagaagcgaacaagccgtttaccgaaatggtcgcgggttggatggctttcaagtgcaatcgaactgagcagcgtctggcagaatccatcgcacgtcggtatccggaaatcgaatgaacgcactcatggtgacatatttcgtcgagaacggtatgggctacctctttgagcagccctccgagatcgctcgtcctttggcttgctcaatgacaggcaagccgatggcatggcctttcagggtggacaagagctttgtccgagacgacggatatgtccctgtgcttctgcaggaggcagcaaacgcatgatcaatcgatataagctcgacgtcctgctgacggatgaagaggaagacaagctctgggaaatgaagaagaacaacgacccgctgtatggtcgtcgtatcagcgaatatttccatgtggttgaacacaatcgcggaatgcagtttgccattgatcgtctcaacgaagcctacgccaacgactttgttgatgagtttggcattgacttcctggatggcagcgagtacgcgttcgtcaccgacaaccatgacctggcatcggaactgattcgcatcctcgagctggacttcatctacgacttcaaggctgacgtcttcatctttgatatctgggcttgccacgaagcatggctgtcctatctgtacgagcgattcaagggtcgtgttcgcggaaacatgcgagcgggtgatgtggcagaacggtatgtacgagaaggctatggcatctatcaatcgagccagtcttatcgtatcatgatcggcgagaatgttgctattccgtcgttcctgagccaattcaagagccgcttcctgagaatctgaaatgaaccttatccactgggctgaccaacacctcgactaccgatgctccttcatgccaacgatgctcaacatcaatggcgaaactgagactgttactgttcgactgaagagtcggcagttgtgtcaagggtcgagaatggtaaccattgtgcgagagtccggtgaggttattgaagtgtacctggatgcccttgagccgatgaccgaaagcctgtattattttgatacgcctgacggactatctggttcacttcttattccatttcctcaggaaaccgacgacggctgctaacggagaacactttgacaatttctgcaaaaatcattgctgattcgattgaccctaacggtaagcgaatcacaacctacgaactggaatacccacgcttcatccattcggagttcatgacccatcgtctgttctctcgcaatgctgcatcgagccgtgcaattccgatcgacaaggcaattcgcctgatcctggaagatactgctgcaccgagccattggggcaagaatcagccaggcatgtctgcaaaggaagagcaagatgagcctatccagctgaccaagggaacgcgctattcgattagccgcctgggtgcatggaattgggcacgtgaccgcgctgttgaagctgcgactgccttcgctgatgccaagtatcacaagcagatcatcaaccgtttgctcgaaccgttctctcacatcaaggtcgttgtgactgcaactgagtacgacaatttcttctggctgcgaaaccatgctgatgctcagcctgagatcaagattctcgctgagaagatgctcgaggctcgctcaaaatccttcccgaagctgctgcgcccaggagactggcacgttccttactacaaaggcggtcattggtttgcaagtggatatgctcgtggcaaggaactcgaggaagtcgatgacaagcgcggcggaagcactctgaaggaagcactggctatctcttcgtcttgctgtgctcaggtgtcgtatcgtgtgctggatgactcgcttgaaaaggctcaggacatcttccgtcgtctgattgatgcaaagccggttcatgcttcgccgtttgagcatcaggcaaccccgatgaaaactctgtacgatgagactgaaggtcctgtctacaactgggatgaaggtgtaactcacattgaccgctacaacaatggttggtcaggaaatttccgtggctggattcagcatcgccagctgatcgaagacaacgtctgttgggactatcatgagcatcagtagtggaactatcgtcgtagaaacacctgagtctatccgttgggaccgaaccatccgcaattggcgatggtggacggtcattccaatggtgttgcctgcagcactgatcatgtttgtcctctatcctctgcactatgtgctatggccaattggacaatggatttgcaatttgtctaacagtctatacaatttcaggtcaccgaagtgggttcgcaaattgcttaattgggcgtttcagaaatatccagagtctcagagaaaagtttgagcccctcaatggaaatccagacagtaattgacgacatgaaagccatggcatctaaatgggatgccattggtgcaggcttccaggcaattccgattcatacgtggatcggaatgcttgagcagtatcagaaggaacagaatcctcctgaacctatcactgagcagaagatcgatgactggcatctgcctatcgttggttcggatacctgcctgacaatcaaaggtcagagccgctggttccggtgtacggcagacgactgtggtgcgaacgtcttctctaagacgcgtgatccgaactactatgtatgcaatggttgcaactctggctacgaaacgagcaagggactatgaagaagattacttcgcacaaggaagtcaggtgtaagactcctcaggaactgtctgacctgattgctagccttgctggctccgaatggtcactagcagcattcccttctacctttcttgatggcactgctcaagtttcactcgtgaagatcgatcttgttgaatacaagttctcagacaccgagatgctcgactggatggaacggaacgaggcggtctttagcagcacccacgacaacaccttcatggtttctatgcggctgcgcgaaagcaagaagtatggagctctagcgtgtggtctaactgctcgtgcagctatggagaaggccatgatcaacatcaaaggtcaccaataccttttcgaggatgagagatgatatatcaagatgcaagtggctttgttcatcaaactgcaagtatgaccgagctgctcaacctgcgtgaactgatcaatcttcggattgaagagaagcgcaatgaggacaggactcagatttggcgagcctatgacgatgcaatgaccattggttttgctacgaatgagcaactacctcagctcctgaaatggatctcagaacgtgctgagcatatctccgaaaagctcgttgttgagcagtatttctgtgtcaactctgaggttgaggattggcttggtagaggttggttcctctaatggcagtctatgtcgatagcatgagagcgcaatatggcagaatgatcatgtgtcacatgctagccgacaccgatgaagagttgcatgccatggcagacgcgattggcgtgcaacgaaagtggcatcagaaagctggcaccgtccatagccactacgacattgctctttcgaagagagcattggcggtccagcacggcgctgtcgaggtagatcttcgtcaggttgcctatataatacgtggtaaacgccaacgcctaaaaggtgacacaccatgaagaagtttctgatcgcactgatgctggttctttcgttgggtggctgtgtgagccgcgaagagtacatcgcagaacaagaaagcaaaaccacgaacgaccagtgcctgcgaaatcagattttccagcagtgtctggcaaccattccgccgggaccgcagaagactgtctacaacgactggaacgaagttgtctcagaatgttcttctgttgcctactaccagtcgcttcgtgttcgaagccaggtgaagcaagaatgtcggtccgactaagagacatccaatccgaagggcgcatcgagaaggcagcacgatacaagtgcgaacttctcggtcttgatccagatgaagcgctctggctcgaagatggtcggagcaagaaggaaaagcgttggatgcgagttgcgcgcgagatcgaaaacttccgactcaacctgcaaattgtatcaatgttccttggcgacgaagtgaccagtcctgtatcataagtaatgtagattcacatcgaggcatgttcaatgagtaagcgtttcgtttcaacaaaagaatacaaggagttggctccggttgcatatcgccagtggcgcgaccaaggcaactgtaatctgatccacggctacgcactgtcgttctatttcgagttcgagtcggacaatctggattctcgtaactgggtggttgactacggcggtctgcgtccgctgaaggacttcctggaagagtacttcgaccactgctatctcctggcacaagatgagccgcactatgatgcgatcaagaagctgggtgacctgggtctgatgaagatcaccgaagtcgaagcaactggctgcgaagcgattgcagacttcctttacaagtacatcaacaccggcttccttcgcgagatcggtgcacctgcagacgtttggtgtcgttgtgttcaagtccgtgagacggaaaagaacatggcgatgcgacttggtcatcaagaggacaacgaagacctgaccgtcgacctgtctaaatatcgcagagatggctgatcacggtgtaggcaatggcatcacaacccgcgcatccagagcaacgtaagatccttacgaagttctgtgaacaagaacttgtacgtcagcgggactatctgatcaagaagtataagctgagagactacaatcctcagcttttcttcaattggaaaaggaatgcagtccacagttggggcggatcactcgaggatgatataccattcctcatgctgatgcctcatgagatttggcagcacgtcggcaagacaggaaagtacatcttcaatgagtacgagttcctgcatgacaagcctggcatcggaatgggcagggcgaactggaagcagcacatctcatggaccatggctcacgaattggctcacaccatttgtgagattgagcgcttcgcaaagaaagctaagaaagtcttcccgggacagactgcaactgagcatgatggtcatggacccttgtggcagtctgtctactatgatctccgtgtacatcactgccgcgaggaattctatcctgttgaggagattgacttctcaaacgaggtccactactcgcatcacagggaaaagggtgagcaccgctttgtcttctacaaggggaacaagccattcgcatggtttgtccgcactgacggggtcttctggcagaccacgtcccgctggcggaaagcgggcagggccagaaacggggccagaacccctcgagaactgaccagaaatctccagaattcgtgactttttgtcctgagagttgtaagtgtctgattcgtaaggttgtcctcaggacagaaagaacttaatatgtggttgtgggacaaacactcctcaacaaacacaaaggacacgaagatgagcaagttgaccaagacccagaatgaagccgtcgccggtgccgtgaaggcagtcactggcttcaagatgggagcggagacttccggggtgcagcatgtggaagccggcaacatcaccagccgcagcggtcgtaagtggaagaccagcatcgccttcaccaacgacggcggcaagctcaaggcggacctgaccttctccgaagtcggcgccaagaccgagaccacctactccagcgagaacgctgccggcgagaagctgcgcgaattcatcaagtaccgtggtcgccgcctctgcctgaagggcgcggacatccagcgcatccttcgcttcttcaactccatcgtcccgaccggcgaagccgcgaagccggcgaccaagaagacgaccaaggctaccaaggctaccaagccgaaggctaccaccgaagccgtcgccgaaaccgccgaagcctgagccctacggggcggcgcaagtcgccccacctttcggagaacgaacaatgccccgtcgtatcagtctactcccgcagcaggcactggatttcgctcagctcccgatgatcgtctcaggcgatgacgagctggtcgagaaggctctcctggtaaagaagagcgatctacctggcgcctacgcatacgtcacagtcaccatggtgacgcgtgttgcggggaagaccgaggacatccgggtctgcgttcgtaaggaagtcgaataatgaagatcgtgatccaagtcctcgatggtggctggcaggaccagtccgaacacgacaccatcgaggacgcagagaagatgatggacgtggtacagggaggcgatcccgatgcctacgtccgtatggtgcagttcgttccgcgcttcttcgctgagtaccagaagcctctccagctgggcagtgacaggacctacacgcacattctctacgtagccgagtaccctgcggacaggagcatcaagtcctgcaaggcgcacttccggtctcaggtccgcaagttgcctgagttcaatgatccgacgttcaaaatccgtcacgagtacgtcaaccctctgtcgtattgaggtaacctggagatcgtcatgaacatcttcgtcacgcacctgagtccggttctagctgcacggaacttggacaacctgcgtctgaacaagatggtggtcgaaaccgcgcagttactctgcaccgcgcatcacatgaaacaaggcagccgggctaaggttctctacaagcccacgcacaagaatcacccctgcgccatctgggttcgccagagcaacggcaactacaattgggcatatcgtcacttcgcggctctggctgcagaatttgaaagccgcaacggcaaagtccacaagacctgggcagatttgaaggacgtgctcgagaacgctccgaagggcatcaaggatgtcgtccgcactccgtttccgaactgcacgccgcacaaggacatggagctgatcgaagcctaccgcctgaccatgaccgagaagtggcaagcggatgtcgaagctggtcgtacgccaaagtggggtgagagattgacaccaccgttctgatcgaacgccaactagaaactttctaaaagcgccagagcgaaagcctggcgcttgacctatctatggtgcccgcatatcataacggtatggagacattattgtggttggcagttacattcttggggccacttgtactggccttcccgccagcattgaagaggctggtgaactactaccgttggtcgaaaactgtctatgttgaggacctgattggatatctcttccgaaccctttggccaactctgatcccggctattggatggttcgttatgccaggactctacttcgaagagttcgttgaaccgattctcaaaatcaagctcaagggttgatcatgtggccattcagtagtcgcaaggatgcacaaattcgttctcttcatctggacctggcaaagaaagaaggtgagttgtccaaagcactgaaatcacatctcgaaactctcgacaagtacgagaagggactcaactcccagatcgcgctgcttgaagtggtgagccggtggtccaggcaactagaccgagataagagcatgagtgagactgatcaaggcttgttgaaagttgtactggaagatttctccaaggcaatatctgagcattgtcagcacaagaaatgggtcaagactgatcgacccgatccaatgttcccaggcgactggtatcaccagtgtgaagtctgtggcaaattcgactatgaggtctaaggaagaaatatgcgtaagctcgtaaccctgcgcactgtcgcagaaattgttcccatcgaaggcgcggatgccattgaagtggcggtcgtcgacggctggagctgtgtggtcaagaagggtgaattcaaggaaggcgataaggccatctatttcgagatcgattcgatcctgccatacggtgacgaacgttttgccttcttgatggcccgtggctgcaagatgcagccgactgaggatggtggtctgctcgaaggtcatcgcctgcgcactatcaagctgcgcggtcaggtgtctcagggtctgctgattcctgtcccatcagactggagtattggtcttcgcatctgcactccggattatcagactttcgagtttgacgatgacctgtcggatgtcttcggcgtcaagaagtatgagaagcctatcccggcacagctcgcaggaatgattgcaggcaactacccggtgtggctaccgaaaacggatcaggatcgaattcagaactgcttcggtcgtgcgcctgaaggcaagtaccatgccgaagagaagttcgaaggttcctcaatgaccatctaccatgatggtgagaagcttggtgtgaccagccgaaacctggacctcaagctggaacaggaaggcaacaccttcatcgacgtcgccaaggcaagtggcatctttgatgcactcactgcgtggattgctcgcttcaatcaggatgacttcattcctcgcattgctattcgtggcgagctgatcggtcctggcgttcagggcaacatctatggactgacggcacatcgtttcatgatctacgatgtctttgctcatgaccattacctgacgcctctgggtcgacatgtcttcctggaagagttcatcaagccgtttgcaggaaagaatgtaggctatgtccatactctgttcacgatgactcgaggcgaatacgctacgaaggaatcgtacaaggagttcctgggcaaggcaacaggcaagagcattcttgcggacacgctgcgcgagggaatcgtctacaagtcagacatccagcaccgcggtgacgtgttctcgttcaaggcgatcagccctgaatacctgctgggcgaaaaggaatgaacgagcttgtcgcatctcttatcctcggtgtcatcggctttgtagtcggtggcatcattggcactatctggttcacaggattctttcctgctgcactgattggtctaatcgtcgggttctgcatcctgtggtgcccgtgtatcttaatgcatctggactgaaaccatggctgatatctttcaaagggaagtgatcgattcgttccgcggcgaccacgaattcctctctaacttctatcgtgagatgatggaatacgatggacatgtttgggcgactgcggaacacgcctaccaagcatcgaaatgtgccaaacaggatgagtatgatctgttcctgaatcctatgctcactgcaggtcaagcaaagcgcatgggtaggcatgtggacatctggaagaactgggaagcaatcaaaattggcgtgatgcaaaagatcatcgaagccaagttcgaggcaggtacgccactggcagccaaattgctcgcaaccggagatgcaatcctcatcgaaggcaatacgtggggtgacaaattctggggacagtgcgatggtgaaggtcacaatcatctcggcatgattctcatgcaccataggggcaatctcaggctggagccataatggaaagcgatgaaattatcaggctaatcaataacgaacggcaaaggctctgggaagaggacagtgcgaatgaagtcactgaccaagccattgttggtcagattagaactgacctgctgacacgggaagagtttgataggaactgtgcgcgatatgctgattgggcatactacacgccaccggatcgattcgttttccactactatgaggatggcgttgaggaagctcgcatttgtgagcgcctgatgctaggaatagaacgatatgtagtgtctggcgtcaacggtggccactatggaatctacgacacccgtgatgtaacgttctatctgaaaacaggtacatggattgaaattccatcagacgtgttctttgctcaggcagacgttgatgcggctcagaagaaactcgacgaagcaaaacagcgactcaaggatttaaaatgattgctattccacacgatatcatcactcacaagacttcctggcgcgccgctatcgaactggcgattgcgaattccccaccgagggattatgatcaagacgatgctgggtattggcgccatgagctccagcgcttcgatgaagcctatgcccagctggaagcgatggacctagttcttctaccttaagacaaaacgccaactcaaggagtttgaaatggcaattgaagtgatcggcaaagacccagcgcagtatcgtgagacgacctgtaggaattgtgcttcgattcttcgtttcgttcttgctgacgtacagaagaagcaggtgagcgattacaccggcgatacggaaacggtctattacgttccttgcccttgctgtagcaaccaagttagcacccgaggctactaatgagactactctgccgtctaggcattcacaaatgggggaagtggtccaaccgttggtacaagaagtacatcatgcttgacccgtgggactttgaatggactgaatatcgagttcacagaagtctgaaatgttcagagtgtaatcatcagaaagataagtttgtcgagaccctgacagaagtagggtctgcgcttaaaggaacgaatcagcctacttgggactgattcgctgttcctagtgcggcagcaagttctgcctttgatgagtccaatgcggttgcgagcttctcgagcagctgtgtcagcatcgtgttttgaattcggagttgctgttctttggacagcagctctttcaccttttccaaacactggtctgcctcagcgccgatcttcataagctcagcttccatgtccgctttctccttgcgggcatcgtctctttgcttgatcaggtcctcgatcaagtttccttctgcacggtcacggaccaactctagcttatcgcgggcgaggcgacgcaagaacatcgtcgctccacctagcgcggctacgactgatccgccaatgattgcaggggtgattggttccattactttaggatcaggttgaggacaattctcttccaggcaggaaggtctttttcttcgtgccactgtctatggctaacgaggtcgccttttggaaatcctgtttcgatcaccgtatcaatgcgtcggttgatggcttcaattgagtttcttgcgtcatcaagacgcttctcgaagctttcgatcgacacctggacttcttgcacgatgataaggatctgagccagtaggctttcggatgcagcttggtccatggtagtctttaagggcggatgggtatcgcgatatttatagagaaactttactgaaccgttatatgcagaggtcgtgaaggaagtctataaatatcgaggatatcgaattgataaggatcgagccttgattaacctagaccaactctatgctcgcaccccggtcactactttcaccggcgccgagattatcgcggtccagaaggatggcgtgacgggtgcatctgttctgtcgacactgaagaactttctgaaaagcggatttgttgccaacgatgtgagtgatgcaacgactgtaggcaagcagttgatgaaggttgcatccgtttcagcggcaaagactctccttgaagtgcctgagccaactccggagccgttggctcctgtttcactgactgcaagcactacccttgcaaagacacacgccaatcgccgcgtctttgtgaaagcagctgcaaccctcaccaccaatgcagctgtaatcgctgatactgacacgttcaccatctacaatcttcatacggctgcggtaacgctgactccgaagagtggtgaaactttccgcgtcaaaggcacaggatcagcatcgacctttagcattcctgcgaacacgagtgtgcgagttttcctaatcgacgccaccacttggttcatcgagaattgatagatggatgacctaatttctcttcccgtagtaacagatgacttcgacggacagacagctgccctcgaccaagccatccgtgaggctgcggttgcattcaatttcagctatttggcagacgctcctacatttgagcagctctaccatgttcctgatcttgtctacaaacttgtcgaacactacacgatgcgaggcttcatctgcacctacgatggtgaggcaggtaagctaaagattgcatgggatcacccaaatatgtcctggctcgaggcgagggaaattactcgtgcgatcccggaaatgatcccaaacctcggcattgcattccgtgctggtctgctctatctctgcatgaccaacggtaccgacctgcgcgccgaatccgacttcaccctgcagactaagctcggaaaggaaatcaaggctgctgctactctgggcaacctgcagctttccttcggcttcccatctgtgccagctccagctgttcagaacctctttgctcctaccttccaggttttggaagaccaaggctttgagatcacctacagcgcaaatgctaacatcttccttttgaagtggggcacaagcatggcattgaactttgtatctgggcaaacactcgaggttgtgctgtcttgaaaggtctcgtaatcggcaagccacactctggcaacgtctgcattaggtaccgtgaggatgcgtcttcgacggacttcctgccactacaaccaaacccgtctgagccacctatcgttattcctatcgaaggaactggcgatatgttccgtgcgatctacgacaaggatgctaacggtgtagttgacacagccgatgaagttcctgtctcgcacattcctggccttcaggataccatcaacgacatctacaaccaaattggttcaggtggcggtggtggaggaaactcacaggtcatcttcgtaaccaacacaggtggcgagacgttcctacctggcatgcctgtctgtaaggtcggtagttcctacctgcgtgctcgctccactggtccaagacagacatgccttggccttgctgttgatgcgtcaaacccaggtgaacagctaaagattcagcaggcaggtctattcactctgtctcctgaaaattgggacttggttaccaatcaggttggtggccttggcacgacgatgttctattacgtgaacatggattcgcaattgaccatgactccgcctaccgacttccctgagtaccttgtaaaggtcggctacgccttaaataatactgacttcctgattgaccttgacttgtcaatcaaactataagagacggacatggcagacttcaaaccccttaagctaggctctaacaacgagctgactcgcttccagaccggagacagcgtcggcattgacgccggtggtaccggttctactactgcggctggcgcccgtacagcccttggccttgccatcggtacggatatccaggaacacagtgacaaacttgacacgctcgcagcactagctggcaccggattcctggttcaggacggcgcgaatggttggcttgcgcgtaccgtagcgacggcctctacaactcgactgactgttaccaatgcgaacggcgttgcaggcaatccaacgttcgacctcgccacagtcaccgacagtggtacaggtactttcaagaaggtaacggttgacggatacggacgcgtaactggcacttctaacgtaacgacagcagacatcacagcgctcgttgactcgacctatctgaagctgtcaggtggatcgctcacaggtttcctgacgctgcatgctgatcctacgaatgcgatgcacgcggtcaccaagcagtacgttgatactgtgatggcgtctggtggtattcctccgttcgctcctgcaaaggttcgtaccacagctaacatcaccctaagcggtgcacagacaatcgacggcgtttcggttgtcgcaggtgaccgtgttcttgttgcacaacagactactgcttcccagaacggtgtctatgtcgttgcggcaggtgcatggacacgcgcaacagacgcggatcagactgctgagttctctcctgcacgtcaggtatttgtccagcagggtacactctatggcttcaccacatggggcgttggtaacacgactgctcctgtcatcggcactgatgcaatcacattcgtgcaggttggtggtgctgctcaatacactgcaggtaacggtctcagcctcacaggtacgcagttctctgcggtgggcgtttcagggcagatcactgtcactggtagcggcattggccttgcaacttcaggtgcaacggctggtacctacaccaaggtaacggttgatacctacggtcgtgtcactgcaggcgcgacagctactccagccgacattggcgctcaggcttcttcgactaacctcaccgcgctgtctgcctacaacacaaacggcttccttgtacagtctgcggctggcacattcgttggtcgctcaattgctgtggcttcgactacacgtctgaccatcaccaatggtaacggcgtatctggtaacccaacacttgatctggctaccacaggcgttacagcaggtacctacaacagcgtgactgttgacgtctatggtcgtgtcactgcaggtacttcgactgcttcggatcaggttgtaacctcgctgacaaacggcaacgcaggtgcgatcgtcattggtcgtgcagtctacatctccggtgccaacacatgtgatgtggcaaacgccaacaactatggcacggcaagcgtcattggtatcgcaacctcggtgacaaccgcatcaggtgcagcagtgaacgttgctgtttccggtgtcgtcactgcaacaactgctcagtgggatgtggtaacaggtcagtctggtggtttgaccacaggtgccaagtactacctctccaacacaacctcaggtgcattgaccacaactgctccagttacaggcatcctggctccggttggtatcgctgtgagcacaactaagctggccctgcgcctcgagcgagttgttgttctctgatacacaatcaaacatcggttgatacggaagaggagcctagtgctccttttcctttgaataaatatcgctgtattacaggacagaataatggcctccatcaagcctctttatatcaatgcagcaggactcgaggctcaggcagcttcgggcgacacagtaccggttgattacggcggcaccggtctttcctctctgactgcaaacagctatcttcgtgcggtgtcaagctcagcctttgagctccgcacaccagcccaggttcttgctgacattggtgcgctgtctaccacaggcactgctgcttcggcgactatccttgcgactgcgcgtaccatcaacggaacgagcttcaacggctcagccaacatcacaacttcaacttggggtaccgctcgtaccttgacgattggctcgacaggaaagtcggtaaacggttctgccaacgtggcatggagcctgactgaaattggtgcagcaccaactgtccatacgcatgtatctgcagacattactgatctacagacacagctaagtggtcgagttcagcgcggcacgcttcagttgaatccggatggtacagcacctgccacattcttcaacgaagtctccgacactctcgcactcaaatattctaacaactctacaggttccacaggatacccaaccgagtttggtgcgaccctgtctgtgatcatggaaaagcagtcaacacgttcgtttgacctgcatatgccaaccaactcggctaataacctctacttccgaggctattcgtcggcaggtacaccaactgattggaagaccattggtgccttgcaaaacaccaacacctggactgcaaagcagacgttcgcaggtggagcgaatatgtccaacgacgtactccttgagtacggttcgggtggtgcaacaatccgtggctcgtccactgggtcaatcatcctggcttcaggtgctgctgcgggtgcaggtattcgccttcgcccaaacggtgacactagcctcactggtcaggttgccattgacactgatggtatcgtagtagcaacaggattcagcggtccgttgactggcaatgctacaacggctaccacacttgctactgctcgcacaatcaacggcacatcctttaacggatcagctaacatcactaccgctaactggggtaccgctcgtactctaaccatcggtggcacaggtaagagtgtcaacggctctgccaacgtggcatggagcctggctgagattggtgctgcatctgctgatgacatgcttttgatcggtggcgacaaccaaatcggtaacggtaacttctacacaggcacagctacaggttggtcgggtggcagtggtagcatcggaagcggaactgctgttcgttctatcgttgatagcactcttgcgagtacgggtaaggcatatcgaatggatattgccaacttacctaccgcaggctacattgaaatcatctctaacactaacgtcaagattgctcgtgttcagggcggcgaaagagctgtggttgcagcatacgctcgcggatcggcaggcgttcgtgtcttcctgcaaatccgttggaatgatgaaacaggtgcagctatctcctacactggtacacctaacaattcatcttacctaacgtctgagacctggacaaagtacacctacagtgctacggctcctactaatgctgtatctgcaaacctttatgtccgagtctacggcaacaccgcagctgatcaatggttcgagacgagccatatctcaatgcaggttggcaatgtaagcacaggatatgctccatccattgatgagcttcgcaacgatttcaacaacctgatcaccactccaaatgtctggaatcaattgcagacattcaacggaggctggaccctaccaaacaacaagatggggttgctaggcactggtggaggttcgatccgaggaactgacacaggtagcgttgtactgtcttcgggaacaggcggcagcggtttcatctacgttcgtcccaacggtgataccagcacctcattccagacagtgttctatgccacaggcaatgtggacatgccaaccgttcgtgcaggtgcatctactcctaatgcagctggcgctgtgctgcttgaattggtaacggaaagatcatggcagttccgtcagcgcaacacaggtgcaacaactcagctagaattgtttgatattactggagctaaggactttgtcctgtccaacacatcaaacacgaacgtcattgtgatgaacccgacgaatagctcgatcagtgcagcgacgttcacaggcgcattgactggtaacgcgtcgaccgcaacaactcttgcaactgctcgaaccatcaacggtacatcgttcaatggttcggcgaacatcacaacatctctatggggtactgctcgaaacatcacaattggttcgacaactaagagcgtcaacggttcggctaacgtgtcttggaccctggctgagattggtgcggtagacgcatcaggctttgtcaagaaggtcggcgacactatgagcggtgacctcactgtttctgcaaatgtcagtggtcagatggttcgtgcaggtttctctgccgaccttgcatttgctcaggtcagaacccttggtgacggttcaagtatcgtttggtgggaatccatcctgaagagctcaggcggtccaggaggtgagtcttggtaccgtgcaaagtctcacgtatggacgaacgatcagggtaacatcagtgctactctggacacatcaggtacctttaccgcatacaatgttcttgccgcaaaaagtttctctgtcacagattcaaccgcaacaagcttgatccaaggaaacctggctatcaacgatagcctaaacgccaggggcgtgatgtacttcggtggtaaggttgccaacaccggaaacaagctccgtatcctcaacccagattcttctacctctttacgaattgatgctgtgactgcagatgcgtctgcatttgcgcagatgaacttttatgcatctcagttcacattcatcgttggacgaatcggattcaacggtcaccttaactcgacagccactgcagctgttctttctgctcagaatggcggcacagtatacctgcgaccaaatggtgccgataactcgaaccaagaagtcaccgtaggtaccgacggtacactgaatgtctctggtagtatccgacttggaggcaacggacgtaacattcgtttgtatgataacaacgtagacactgcgtgcgttgacattggctcgggtattggtacaggcactgaccgtggtggatatgtcatcaaccgaaacgcgagtggtgaactatcgctttggggtcgtaatggtgctgtccagcttcgccttggtctaagagacggtgtggcaggaaacgtagcacagatcaatgtcccgatgctgttctctgggccaagtgtagatgccggcaatgcagcaacatggtcaatcctcaccacaggttcctatggtggcggtattggtatgcgcgacaatgcaggctcaggcaactacttcggtggaatgtacatggcctcgggtcagatgtacatcggttgtggtgcaccaaatgaggcaggtattcgcgcttcggttgtgataaagaacgattaccaatggtacttcacaggcaactatatcaacattgaaggttcctcgccaactattcgatgctacgataacgatcagaattataccagctggattcaccacaacgacggtaaccacggattcctggcacacaacagcttctcttgggcatgtttccgtaactcagggaatgactggcagtgccagaacaacatcatcgcctacgcatctgatagacgccttaagaagaacatcgttgatgcaccaaacgatatcatcgagcacttcttcgagaatgtccgcatccgacagttcgattgggatgaagagaagattgctcactataaggtaggcatcaaggcacgagttggtgaggtgggtgctgtggctcaggaaatgcaggcggtctattctgacgctgttgcagtcaatgaggcgcacaaccagatcaagaccaaagacaaccctaatcctttgaagccagacttcttgaccattgactggacaaagactgttccgcttctgattgccgaagtacagaaccttcgccgcagagtagcacaattggagaaccgagcatgagctcacgagtaatcacagaagaaagcatcacccgtattcgcgagactgttgcacctaacatcacgattcaatgggatccagtaaccaatggaggtcaggtaacgttcttcatgcaggatcagatcacagagaatggcgtctacaaaggcatgcaacctcatcaaggactgcgccctaaggagaactctcttgatatgaagggtgtgctcattgtgcctatggaagagatcatgaactcgaccattgtgacatcctcaggtgaaacgcctggttatgtgctgatggttcttatcaaggcatactttgagcaggtattcacggatcgtctcaacaatcaggacgctgcggatgcactcaagggcggtacaattcctgtcgaagagaaggcgagcctctaatgccaattccaggttcgggttcaatctcatttgcagatctaagaaacgagtttggcggtggtaaccctgtaagaatctcagactacttccgcggcggtccgcgagttccaaacacaggaacaaacgcaggcgtaccaacaagtggaatcgtctatctgtcgcagtatcgaaatgcgagtgcatctacaccactgactgcatcggttccggatatcaacgcatcgcgtctcccaaacggttcggctacacgttcaacaacagtgactgcatctggtggtacaggttcctacagcctcaccaatgctgttcttttgtcaggtagtgcaacagtttcccgaagtggcatgtctgtcaacgtgacagcatctgctaccaacgctgagagaaacggttcggttcgcgtaaccatctcagatggtgcaaccactatcactcgcgacttcaacttctacatgcaattcggtacgccgctctaagcctgtaaataatggacaacgtaatgatacattgcccggagtttacccaatgaagtttgccgcattccaaaacccagctgtttttgatcttctgaaccgcctattcgtggctcaggtacctgtcaaggtcgcctacaagctcagcaagatccagaaggctgtgactgttgagtcggaacgttaccaagacctgcgcatgaagattgtgtccaagtttggtaccaaggacgagaacggtgagctcatcgtcgacgaggcaggcaatgccaagatcgaggatgcagccctgaatgacctcatcgaagagatgaaggaactacacgacattgacgttacgctagagaacaagatcaagctcgatgacctcgagaaggttgacctctccgcaacggatctgtctatcctagaaatgttggacatcctagaagagtaaagatgcaaaagacaaaagttggtcgttatgtctggaatatgctgatcgccattgatcagtttttcaacacagtgtttggtggtgacccagatgaaacgatcagcagccgaattggcaagatcacagctaaccgcccgaagtcttgccaattctgtgtcttcctttgcaaggtattgaacaggatcgatcgtgaccactgtaacaaggtcattgaactcgaccgaggttggagagaggtaatcaagtgaccatgagcactgaaactgtagcaatcaagatgggtgcacctgcggatgtcgcacgagcactcgagaatgcctgcatcaagtttggcatcacaacccagaatcagaagtcgcacttcctcggacagatctttgttgagtcgggtggcttcaagacactacgcgagtcgctgaattactctgtcgaaggagtgatgaagacctttagccgtgctcgtatctctgaggctgacgctaagaagtacggacgcaccgcaacccaaaaggcgaaccaacaggcactcgccaacatcctttacggtggcatgtgggggctcaacaacctcggcaattccaaggaaggtgatggttgggcgttcattggtcgtggcctcaagcagctcacaggtcgttccaactacacagcttgctcgcttgctctgtatggtgatgatcgccttgtaaagaatcctgccctacttgaacagcttcctgatgcagcactgtctgcaggttggttctggtcttcccgtggactcaactctctggctgagtctaactcgtatgaacaggtcactcgcaagatcaatggtggccttaacggatacgatgcacgcgttgcagcaacaaagaaggcatacgcgctcttcgaatccctaaagggctaagctatgtctcaagcaacacttcaagccgcaactctagctatcctcgcaggtggcgcatcctggacacagggcgcccttgcacgaaaggctgatggtctaccatgttccccgttcaatgaagatgcagttacatgggacatgatgggcgctctgatcaaggctcaactcgaatccgacgagcctaactggaccagctatcatttggtctacaacgcacttcgagatgctctgcctgccgactacaagagcagagacatcgaagcttataatgatgacgcagatgtcgtatggggcgacatttccgctttgttcgcctgattcaatcgaatcaactcaatccaacccagactcaaaattgaatattttagaaatattctgagcacaatacaaggttgtttggcgtaacatttctgttaccctaaacggcactgtaaaggagacagattatgaagaaatttgtaattttgtttctgctgctgatcacttcaactttttcaacattcaatacacacgcagccgaaacgatcatcatgcccgaagtaatcctggcacctgcgccagagattgtcgtggatacatccatcaaggtacacactttcgtacctgacctctcagagccagacatccttgtcgcagctctacccagtgaagcagagcttcgttgcctgcagaaaaatatctattacgaagcccgaggtcagggcaccagcggaatgacagcggtcgccaatgtgaccatgcaccgcactcaagacagtcgctatcccagcacagcctgcggcgtcgtcaaacagaaaagtagaggcacctgccaattctcttggttctgtgatggaaagaagagtggtggacctagccttcgacaggcagcagacgttcgagcatgggagctcgccggtgagattgcactaaaagcactcacaggcaccctgcgtgatatcgtcaacggtgcaactcacttccacaacacgtcaaccaatccaggctgggctcgaaagctcaaccgaacggcacgaatcggaaatcacattttctatcgttgacctgttagtctaatttggtaaccattcttcggagcgaaagatgcactaccacccgcagcctgataccgcagttttcgtcgttggagcccatactctttcgacgacactgcggtggctcggaaaagaggcaaccgttgacatcacaggtgagaaacttcaagacgtgatgcgacgagttgaccgcgcaactttctacaacaacggtgaagagaccgattgttctttctacgccgctctgtagactacgatcatccaaacaggaatttgaccatgtatctgcagttgtcagactttgaccacctccgcgaaaacccgaacgtgcgtttccgcgaagagaacgtcgccggtaaagatgtcgtcatcatctcttacatgctttccagcgacgagctgtggaagctgccgctcggtgtggaatgccgtggcatcaccttcgatgcccaaacgggtaagctgatctcgctgcctttcgagaagttcttcaacgtcaacgagaaagcgcatacccaggctcacatcatccgtgactacaaggtgcaggctgtactggacaagcgcgacggttcgatgatcacgccgatctgggctgatggtcgtatctatctcaagaccaagaagaccttcacctccgacgtcgcagtggcagctcagcgctccctgtctgtcgagctggaacgcttctgtgaagccatgctcgaactgaacttcactccgatcttcgagttcaccgatcctgactgcaagatcgtcctcgactacggtcatgactctcagcttgtgctgctggcgatgcgtgatatgatcgacggttcctatgtctcgtacaaggacctggaccagatctccaaggcttggggtgtgcaactggtcggcggctataacgctgactataccgttgatggctacctcgagctggcaaagattgccgagggcatcgaaggctgggtcatctacaccgatgaaggtcgcttcaaggtcaagacgaagtggtactgtgatcgccatcacctgatcgatattcgtgaacgcgatatcgctgccctggtgctcgaagagaagctggatgacctgatcccgaacctgctcgcaggcgatgcggacatggaagccatccgtgagatcgagcgccgggtgaccgatggtatttcccatatcatggaaaccgttgccttccttggtgtccacgcaagtggtatcgacctgggtaaggatcgtgccgattgggtcaacgccaactgtggcaagctgtcgaagtttgtccatcgtgctgctcgtggtgtggagaactctgacgagtccttcaaggagttctatcgtcagcactatctcagcaccttctcactccgttcaatcggcaaccccaatttccgcgacgaggaagaataatgaagtacaccgttaccattctgttcaaaggcaatccgcagcccgtcatcctcaatgaggttgaagagttcactgtgaagtatgaaggtgataccatcaccaacctccaatggaagctggcgccaggacagaatatgctctacattgacctgagtcagatcgcattcgtgttcgcagtcgaggaaaagtaagaccaaagttcctgcaaccacttcgtaccaaagcccctgagacccagagcccttgtaccccaaggttctctgggtttcctacgtaagtgtctgattcttggctccaaacagattagcaagtgtctgatctataagattgtcctgtcctacgaaagtctttaatatgtggttgtggggcaaacatacagcccgaaacgaaaagacaaaggaacgcagacatggccaagcacgtagaactgactccgagcaagacctacaagactccggaaaacgctcataaggcggtggagaagttgaacttgccggacttcgtcggtgaccgccagctgcgatacatcatcatgacgcacaccgacggtcgattctatccggtgttcctgggtgaaccggcgatgcaggcaggtgttcacttccacttctgcatcctgggttaaggagaagatcatgagtaagatgcgcatcctgagcggcaagaccttctacatcgaccgataccatgacgagcaggtcgagcgacacatcctggtcagcctcaacgcacgtgagcgcaaggccatcctgaagaacaggaagacccgctacaacttcatccgcaagctgcaggatgccggcatcgtagagcgcagtgggtgccagtgcggtcactgcatgaacggttgggactgctgcggcaggtggttcatgtcccgggcgaagatcattcctgcgccgacgggcgtctacatcgtcaagacttacgagaggaacatctgatgaagaccaagaccaggaacatcctgattggcttcgtagtagcactgaccatcggtgcactgtggatgacgaccccgaccgaatgcacgcacagcggttcggtccccaaatattgcgtggactaagatcatggaacacaacgcctggctgtataccaaagaccgtagcgagctcgaggacttcgccatcggcatgggcattgacccggagcagtactccctcgacgaatccctgattgatgcaatcatccagaagctggaggaacagaaatgagcaggcagtttgtcatcctcaccaagggcggtgagcaggtcgctgagatcgacaccaacaccttcgccaagatcatggctgggaaccgcggcgagatgcagctggttacgacgcccgcaggtcgtggtgtcagcgcctttgtggtcaatcagccgcacagcttccaaattggcggcacggggctgaccactttggacatttcgatcgcgctggatgcgggttatcgcatctaccgttccgaggatatcttctaatgaaggtcgagaacatcctcctgcaggaatacagcggcgaggctgtcaaggacatgccgaagatcctcaaggcccatcacttcatcatggacgcgaaaaacaacatgacggaacgcgccatggtgtatcgtgatgtggctcgccgagctctgggacacgacgtcccgatggacgtttccgatatcgaactgatcggaacctactaccaggagatgtgcaatgtcttcctccgtcaataaggtacgcctgaccaagtggcagcgcggtgaaatgtccttcttggtctccgtgatggaggagggcttcgacgacaacggcgacgtaatggaaggttacatcgcgcagggctacggctttgaccgtgctgaggaactgaccgacctggacaagaagctccgcttcaagcgtcaggcaggctccttggaagtcgaactgaacatccgcgaagccaggaccatctggcacgaattcgacaaccgcctcgatatcgagctgagcaactcgtgcagctcgaatgatgaacacggtcgcgcctaccgcaagctcaaggatggtatggcgcgtttggaagcagttttcggcagtgacgtgaggaagaagcaatgaacccggaagatctcaagcgtatgatgttggccagggcaacgaatgcagcacatgcaatgtggggcgcaaagttctgggttgatcttccggaacaggagcgtgagaagcgactgaaaaagatcatggacatcctcggggagttctcctaatgctccgtcgtttcttcaatcgtcagaagcctgtcagcttcgaggcccctccgccgcagggtgatatgtacgagctctggctcaaggtcggcaaggtgcatatcaagtccgcatccttctgtcatcgagttgcggtgcagttgatgaacctgcgcggtgggaagtgggtggcccagcccgactaccacggcgacttggtaggcgtctacaccttcacccaggacttcatcttcatccgcgttcgtgatgatggatatggtaacgagttgcagcggattgagatcagcatcactgaaggctcctacctccggattccctgaaaactggcctacacatcgtcttaacgagtggtctatataatgcagatgccggcagaaactttctagtccggcaccaaccaaaaggatcatcgtcatgtctacgctcaactcccccgctcatacctacgccaagccctccggtgctgtcaactctgtccgcaagatgcatgtggagcgcggcggtgaggaagttcgcttcgtcatcggtaaggaccctgcaacaggtcgctactttccggtcttcatcgaccgcatcaagcaggtgagtgatcaggagatcatggccaacccgagcgccaaccaaacgggtcgcgcaaagaagcgagccagcgctcgaaaggctcctgcgaagaaggcagccaagaaggcgaccaagcggacaacgcgcaagaacacgttgcactgaaacgaaagtttctgagagaagctgcccgtaagaaggcagcttttcttttggctgtttttcgtgaccacacaagaaaggaattatctatacaatttgtatatcgacaaacggagcaccaatgtgaagttgttcaagaccgccatcgccaagctcaacgccatcccgagaaagaacatcgaacgtgtcgcggcagttgtcgtgttcactgcggtgaccggcgggctggcacattccttcatcaatgatggtgggatggaattcttcaagccgaagaccgtcgcggtggctcaggttgatacctacgccaagccgatcgtcgaagagggtttcttcctgaccaagacgacctggcctgattacaaggacacggtgtcggctgagcagtatgcgaaccaatcgcagttcgatcgcacccacctgggtccgtgcagcaaggacaagccgtgcgagaagccgaagagctatctcgactataacctcccggactacctgaccaagtaaggaaacgagcatgaacccgatcgttgaaaacgcatacacctatcgcatccagaacgattctgagactgttgtctggaagtcccaggctcgtgatgaccgaaaggtagaagccatcaagtctttccgtgccgccaccggcgcaggtctcctggaagccaagcaggtagtagagcactacaaatctctctacgatcagaagatgcgcgaggttggttcgaagcctgccaatggcagccgtatcgtcaacctgcgtcctggcactcgtctcgtggtcgccgaagatgtgcctgggttcttcaaggtaaaggagatcaccgagcgcgacctcggcattgtggacgagtatgatctccttcagttcattgccgatgcggcagcacgtctgggcggaccggtggcgtaatgcctttcgtacttcatcaccgccgacaggcaagccctctacccatggtaaaagaatggtctgaggtcgccggctcctattctgaaaccatggaaggcgtcaaggctgagatggaatggtgggaccgttataatgagcaataccgactgacggattgggaattcaaagtggtacaggtgaaggcgaggaagggatgatggaaaacgatttcggcattgactatcatctcaacatcatgaacaacgggcgaccaactcccgaggactatctccctcctcgcccagagaaatgcctctggaggatcaccagctttgatggctactatgccacctaccgcaccgaatgcggacagctggaagatatccgtgctgaggaatgtgttggcatgccgatggtccctgagcctcaaggaaagtactgccatcattgcggtggcaggctgcatgtgaactcgtcgttcaaaaggaagacacactgatgaagttctacatcgtgggtggcgcagtccgagatttcgtgctgggcaagcacccgaaagacatcgactacgttgtggttggtgccactcccgaagacatgctggacatgggtctgaaacaagtcggtgccgacttccctgtattcatcgacgatgagggtaccgaggtcgctctggctcggaccgaacgaaagactggcgtcggctacaacggcttcaccactgaccacagcaagactgtgacgttggaagaggatctgtctcgccgtgacctgactatcaatgccatggcaatggatcgggttaccaatcagatcatcgatcctttcaatggtgagaaggatatcgaggctcgcctgctgcgccatgtctctcctgcctttgcagaagatcctgtgcgtgtgctgcgcatcgctcgtttccgagccaggttcggtggagagtggaccatcgcggatgacaccatggcgttgatgcaggctatggtacgtcgaggcgatatggctcacctcacgaaagaacgtgtgctgttggaaatggacaaggcattcagtgagccttatcctgagctgttcttcaccacgttgcaagagattggcgccttgaaggttgtcttccctgagctggtgctggttgatcacctggactatctggaaatcagaaaggcagctggtgcttcgcctgcctacatctatgccgttgtcgccctgtgcatgtctgaaaagaatgcgctgcactttgaagcgcggatgcgagtgtgcagtgattggcgccgaatggcacgaatgtatcgcatcatgatgagctgccgtatggacagcaatcaggtcgacatcctgtacaagatggatgcctacaggcagcctgagttgtgggaggacttgataaggaacatggccaaggttggaaggactcgtgagagattcttcaacgacctgttcgttgtctggtccgccactcatggcatgggcttcatgaacctgaccgaagagcagcgcagcacgctcaagggtccggaaattgctgaggctatcaaacagctgcgcaagaaggtgatcaatgaaactcggtgacctgctcaacgacaatcagctattggatctcatacggcacatccgcgccgtgcatgatgaaaccaatggacctaagaataagcttgcgcgcgaactaaagcaagtgctgtccgaattcgagttcgaaccgaaggtgatcaatgggtaaggtggtcgtcgatcaaggcgcactccgaatggcactcaatgtgctgattcgggcaggcaaaacggaagtggctgaggagttggaagcctcagccactgactatcctgagctgccttcagacggatgctatatcgtccgcttcgatgatgccgaaaaggcagacgtagacttcaacggctatggcgcacgcgatgcggcattgaagtactacgatcacatagcttggaattggaacgggcatctctatgtcaagatcgattccaacactcgcgatgcggagaagcagtttccgtcactcaaagtggcagacatacatcgcttcggtcgcgccaacccatcacaaggtgtggccaccacttcccgttgatctgatcattcaaccagacacgctcgccgttggcatctttctcttccaagacgttgtattggaactgatataggatttcacagaagttcacatcgcgcttgagctcatggagggacaagatgtctctcctgattccttttgtgccattctctttcacatagttgttgatgaactctgaggaagagaagtaggtcatccaattagacgctacctttgagcgtcgcttctttcctttctgtttgcgcataccgttgaagaacttcttaccaatgtacttcttgccgttaggcattgtgatcaggtagacgaatccttcgtagccgtcagcgccttcctcaggaaaaggctgaccacggaagtaccagggatcacactcaatcactttctttgcacgagccatatcacagtcatctgttaggtaggatgagatatttaacctcggtccctacacagtcctccagatgttaaaaagatgttaagcggaccaccacagtccaatgactctacgggatgcccagcttttaagcgctgatcctgtaaccccttgatattactagcattctggtcaggaagggcaggcacgtaagtgtctgattctattaggctccggcactcaggggctgtacagatgacgggtcagcgactgtcagcaatgtggttgcgggctccttaacggatcctatacactcagggcgcctgacgtctgagtcaggaaatcgggggacaaaccagtttagattgtgaggagagtgtcatgccgcagccgaggtatccgatgatcgggatagtggtagccgtagccactgattgggagttggtgaaggaagtgaacaaggagcttgtcctacatggagtgagtcctgaggcaaggcgagcattttggtttgaggtcctcaaggtagacaacgcgttgaggatgggtgagatagcgcgagagtgggtcacggtacatccaaccatccaataaaaggaaagcccggaccattgagcccgggctttattgcaactatcaaccgccgaggttggtcccggcattctgtgctctctgattgtcggcactcgatccgatctgtacccaacgtcgatattgaagtgttgtggtgacagtctgataggtacctgagttaccgtaggcaatgtccatggcgccaacggcaatcggataagcctcctcgagtcgaacaccataggtcggctggtccatctcattcaagttccacatctccacattggctgtgaactcgttgtagaaattgagcgtgttggaacgcacattgatgacggtgttctgccataggtcgaagtatctacgggtgtctgcatcagcatcagcgtagaaggagaacgtcacaggatcgtatgcctgagtataaggaacacggaacgatgagctgttctgtgcgcgttcggatgtcaccagattgcgctgcgggaagttagccgtatggcacttgatgttgatcgaaccgatgctattgaagcgtgcttcctccaactgaaggcgtccgcggcgtactcgtgcatcgatgaaatcagcactgccacccacaccctcaggcagcacaaatcggataaggtacttgttcggtctcatcactccacgttggaagtgagagaggaacttcatataaagggtctcgttactcatgccagtcctgtcttacgccatacctggcgggctgtttgtttctcaaattgctgtagcggaagcatcgctacctcttcccagtactcgtccgatacctgtaccaaacgtgatgtgacgtgtgatgcaagatagcgatgaacacatggtgcgaagtattttgacttcacgacgttcttaaggagcttataggacacagccatataagccttgtcggtcccggcacgtttacgatactcgatgagcttatccatcagcttcgcacgcatcacgggtggtaggtaatgcaggttgagcccaagccatccgtcggaatacatctcgacaggaatcacacaggggacagtatcataccaaggcagtacgtctttgtacttcggatcataggtatagataaacatgccaccaatgaaggtagatgagttgcgcttggcaccaaaggcctcttcaggaactttcgcacgcttgagcttggacttagccatggtatagaaccattcgattgccttcgccgtacgcttacgatcatgaaggatcagcttttgctcgatggtctttttaggctgggcgcccgttctatttgcagtcttctttacagtagccatatgttacttccttttggcaatgcctaaatcgtattcggtcatcaccttgaattccatgccatgcttctctgcataggccctcgcggcagtccacttatcctgatttacttgataggtaacgcactcctcaagataacgctcaggcttcttccttccctttgtaggagcgatagtctgggactcaggtttgatctcaatcagcattgtctttaaggaaccatcagacatcttcaattgaatgatatagtcaacgaagtagcgacggttcttacactcagccgaggagtaatagggaatgacgatctcctcactgttccactttactacggaaggattgaggtcacaccatctattgaagcgaagttcccaggaagaacgatacaccacgtcattagcattgcctacgtacttttcaggatgaagtaggcgatagcgaccctgttgatacttgcgtgccattgttaaatcactcgtttaggtagctgcatagggattcagctatagttgataatctcggttgaaaacaggctaagaattgtgtgaaagaaacaccatagccgaaggcacctgccttttcacctggattaaatatctgtagacttctatatttaggcatacgattgtggcacgccaacgatcaaacaaaacgctatacagttacccacctgacctctcggacgagtcagtacacccagctgcgatcgagttcaagttctttgagagaagctcccctagggaaagcagtcctttgaatacggtccatctgtatatgcccgaatcggttgcccagccctctacggttgactggggcgactcaaacctcgggttcatcggaaacgctattcgatcagctgccaacggtgctatggcaggactctcgggcggactcaacgtaggtaaggctatcggggacgctgtaggtatggcaggtgatggtatgcagctgtcaggcgcctatggacttgccaacctgggaagtgctgccgctggtctaatgggcggtaacgttactgcggaaggactaatgggcgctgtggctggtatgatccctaacccgtatgtgactgcgctgttcaaaggcgtgggactgcgtgagtttgcattcgtctttaagttctatccattccgagaagaggactgccaggagatctacgacatcatctctgtcttccgtgagaacgccttgccttcatatagtaaggactctatggggacaggcaataacaaagcactgctcaacttcccatctgagtgtgacatccgttacctatggcagggaaaggacaacgagtggattcaaaagttcaagcgttccgtctgtacgtctatcgacattgactacactggacaaggcatgttctctactatgagaaacggattcccttcggagatcacaatgtctaccaagtggaaggaactcgagattgtgacacgcgaagacatcgtggagggttactgatatgccatcgttcttcaagaagtttcctgtactcagctatacactggatgggtacaacaaggacgctatgaacatcgtcactgcggcggtgttgaagcgtatcaacgtggacaagtcctatgtctatcagtcctacgatgtgcctaatggtgcgactgcggagtcacttgcctatgacctctacaaggaccctactctgtgttgggtgttcttccttgtcaatggtatggtgaatccgttgctcgattggcctatggatgattccgtactcgaggagttcgttgttgctaagtatggtagcctctactccgttgtctacttcacggacttggatggctatcgacttgacgatgtggctgaggcagctgtgcgtgcctatgtagatgctggtaaccctatgcctgcgaatgttcatcctgtgactgcattggaagccgaatccgtgttgaaccgtaagcgtggaaagatcgtcattgtggctccgcgctatatcaaccaatttgtagacttgttcaataagagcattgaaggaaaagtatgaccactgctacgactagtgccaactatggtgacctcaagaagtttgtcgtcactattggcgatgttgatgtctctgctgctgtgatcagtgcacatgtctttcaggagatcttctctcctacgactactgccattgtgaacttcctggatacatcgaatctgttgatgactctccctatccgttctggtactcgtatcaaagtggagattgagactgatatggcgtctattggtgatggtgagcagtcgtgggagttcgtcatctataagatcgccgataaggtggctagttcccagggtgtgttggagtactctgtctatgcagccgacgaggccttcctactcaatcagacaaagcgtatcaagagatcctatgcaggtaagaaggtctcggacattgctacatccgttgttcgagaagcctttggtaagaaggttgacgttgatgccaccgacaatacgatgcagatgatcgtgcctgggtggactccgttccatactatgtcgtggttgttgcagactgccacaaaggatggcgctgccgactatgccttctatcagcaggctaacggcgacttcgcgttcaagtcctttgagaagctctattccgatcctgacgagtactcaggtatcacgttccaggtgcgcccagctaatctaaaggacaacaagggtgattcactctacgactatgccactaccattggtgtctattggtttgaccacttcgacggactgagtaacatcgcatcaggttactattcctcaaagactgcgtcctatgacttcaagaccaaggcatgggaaacaaagacattcaagtttggtgatgacaacgcgcaggacaagaagtacctgaaggtagactcggagtatctcatggatgccgaggatgcgaacatttcgttcattcctaagcatagtggcatgttcaagaatgcagcgtattcggatactgccgatgcctggattgcctcccgtaagtcttcgttgatgaagttcgagcaagagaagttgatcatccagttcccaggaacggcgggcgcagctagatggttcgcgaagtccgttgatgtggacctacctgctcaggactctatgtccgatgaagagttcgatactcaacgtcgtggtcgctatgtcatcactcacatggctcacatgatcaacaaagacacctacaagatcaacgctgagctggtcaagaagagactcgaggaagcataacagctgactgagcgcgcgtaccgctgctctgtttactcggtcaagacctacatacaccaatgcgatgacttgctcaggtaagccatcattctatcaataagagagttctatgtcgcaggtacacaatttttcgttcggtggcggtgccttcgaatggttcatcggagttgtcgaggatagaaatgatccagagaagctgggtcgtctccgtgttcgtgcattcggctactatgatgacgaagccattcctacttccgacctaccatgggctgtgcctatgcagcctatcacttcttccgcgaagggtggtgtaggttcttctcctacgggtattcaagaaggctcccatgtggttgggttctttgccgacggaaagaatgctcagactcctatcatcatgggtacactcgctggtgctccaggagggaagcctgatacgaacaatcttgctcgtggtgaagacctcggacagaccgtcatcgctgagaaggtgaaagctgtcaagatgtccttggcgaatagcaatgcgcttagtggtctgtctgctgccaccaacatggcgaacaagatcaactcaactgtcaaggatgctaagtctaagttgaatagtgttcgtgatcagttctcgaacatcgcaggtctgtcgaatcttccgttcatggctgggttgaacaatatctcatctaccatgacacagatcgccacacttccgtctgaggctaaggcacttcaagcccaggttgaaggagaggtactcgcgatcaagggacaaatcgagaacctgaagaacctcgaccctgaggcactggcaagacagttggtacagaatcaggtaggtgatgtggaagccgcagtgagggcaatcaagtcactcgacttcgactctgtgatgggttctatccagagcattccaatggcgatcggacagatcggtcgtctccaggatgccatcaccaatgcaggaaacatcggaaagattgtaaccacgattcaagggctgtcgagatctattccgaatctcgcatccatccgagcactgggtacgacgatctcatcaatgaacggatggttggagcctactactatggctgcaccactctatccattgaacaagatcatggagaccgaaggaggtcacctacaggagttcgacgacacacctggtaaggaacgattccatcagtaccacccaacaggcacgttcaaggaagtacacccagatggatccaatgtcgataaggtggtcaaggacaactaccgtgtcgtgatgggtgatgactacctacacgtagaaggaaaagttcaagtcaatatcgtcggtgatgcgacagtcgtagtcaatggtgattgcacgacccaggtatctggtaacaagacagatatcgtgaacggaaattattcgttggcagccggaggcaatgtgtctatcgcatcaggtggagcaatgaccatcggtgcagctactcagatggctattcgtgcaatgatgatcaatctcaattgatcaaggcatgccttaaactctgggttgagctggttcttgacccaggcacctttctttctaacttttctttctgataaatcaaattatacagaacggtccaatacggtgtccacaggactaaggacttgtacctttgataaatatcgtgacctaacagagacccatacaatgtccgactttcagcaattcctacaagaagcatccctcaaagagtgcgacgagctcaatgaaagcctaatccgttccgcaggtgcgtccttatacggcaaggcaaagactactcctgatcacgtcgcatcccaggaaaagggacatgtgaacattcacacctataagaccatccgtcgatcaggtagtgataaggaaaagacctatcacgtcgtgagtcatggaccttaccgtaacagtggtgcccataagatcggttctcagcatacccatggatctggcggacaggcatctaagttggtcggcgtctccgaatacaagaacggaaagaagacgaagactcacggtgaagaccactctgccaactcccactccattcacgtgttcaagtaagtcgtaaatagaatagagacaacccaaggaacttttcataatgccaagctcgacctctacaaattatcagttcaacaagttcatggaatacttcctgaagggaactgcgtacactccgcctacttcggtttggcttgccctgttcacgactgtgcctagccttgctggtacgggtggtgtcgaggtaagcacatcaggtaccgcatacggacgtaagcagattctgtccacaggtacttcatggaacggtccttccggtaccaaccaggaatggtccaatgcagccgacgtcacctataacgtgccaacaggaaactggggtaccgtcacgggtgcaggactgtacgacgctgaaactggcggtaacctactctacatcgcaacactggcaactgccaagacggttaacaacggtgacggtgcgccacgcgtactcgcaggacagttgaagatcagtcgcgctacttgctgattgttggaaacacgaaaaagcccaggcgatgaacctgggctttttcacggctagtgatcttaggtcgttgcgatcagcctgacaaactcttcgggactgagcatgttttccttgacaccatagtatgccgtatgccccacgacgccatccaggaaacagatctgggtgtaatgcgcccactgggtcgatttgttgcctttgacgagacggtggttgccgtcgtcatcgaactcgtggcgcatctgttcttcttcgagagcgatccaggttccttcatccagcggaccgacgacagcttcgacttccttcagccacagtccccaggctgattcgtattcgccctgcatttcagcgttgtcccaactccgcgtttctgcgttgtagtacttggccttgatgtcgtgtgccttctcgtagttggcagacttgttccgcagggcggtgtattcgctgtggtgaatgctgttcatggtctttgtgctcacttgatgatgggttgggcttgcttcgattggtcgtactccggttcatccgggaacctgccgaagcggtcggggatcagcgcctggacaaagcctaccggcatgtcactatagaatataccgacagcggtagcgtattcttcgagcgccttcctggtgtccgcttccacaacacggatggcgtgttcggtaccatcacggaagaccaacagtccctcgttgtcgcctatgacgaacttctccttcttctgccagtcgctgatcaggtcattgatcagcttctctgcaatcatgggatggatgttcccgaccatgatcacttcgggccagccacgttccgtcagtccgacggtatacacaaacccgggttcattgtctgccggatcaaacacaccgaccatggtgtaaccgttgagttcgattttgatggccagttcgatggcgagcatttcgttcatcagttcttctccagttgagagctgttcacttcgatcaacacgcgcgtctttcccagacgcaccgcatgcagtactccgtcctttgtgtagaacggcatgacgatgggaccctgaggacgcataccgccaccgatggtccacacccattccttgaagtccggtttcgccatccgttcctcaatccacttgcgttggaactcggtgagattataggacttgatgttcttctcgaatcgttccttagtgatcatggctcagcattcctcgagcttgatcttggaacccataaactcttcccacgccggaatgtccttcttctttccgtagaacgcgagactgacatacagccgtccctgcatgccctgttccgtgtaggtgaccttgttggccagcttcttcggaagacccaggtcgatcagcccctgtcggaactcgcgcaggaacttctcgtcggtgtagatgaagccgtcgttgcgaacctgccacgtctttgcatcgaaacgcgcgtcgatgtagagcgtcatgtcctcattcttaccgaatgcttcttcaccgtagagatatgcctgggcgatcttgatcgcattgatcaagacttccttctttgcggtggaccaatgaccgcgaccgctggtgcttgcgaacagttcaactttcacagacctatctccttttcctgtgcgtcacggatttcaatgaccattttcagacgaccttcaactgccttgacgaacgacttgaagaagcgaatgttcttcttgtcgcccgacttgatcgccgccgccaattcgcccttccgaagttccaactcggcttcgacttcgcgaacctgccgataccgagctgccagcgtaggacgaggaacgtctttgaagatgtcggtcatttctggttgccctactgtttgtccgtgccacaattatatagaactttcgtgtcctgggacaatcttatagatcagacacttacgtatctgtgtgaattttagccgtgaaagagcccggagaaatccgggctccttgtattacttggtctctgccaggacttcggtacgtcccagatgcacagcccgcagcccgtcctcggtcatgtaggccaggaccagcttgccctcgacgcgcttgggcttggagcgggtatggagccagtacttgaagtctgcctcttcctgcttccgctccatccattcacgctggaagggagtcgggttgtagagcgccagcttgtcgctggagtcggacacggtctgggtttccatttcgtcacacatgatctactcctctgttatttcagcctccgattgaggcaatcaaactgtaacggagttctttctgcaggacaaccactttgtgaaggttgcggagtccgctgatctgtgtttggaaattacgaccactccggtcccgtttcatcgaccccagagccacgggtcctctctaccaactccttgaccagcggcttgacggtgtagtaaaagagcataggtctctgtttcatctcagctgcattgaggcgcctttcctctgcgactgcttcttcctttgtctcgaatggtccctgtacagagacgatgttacaacccactcgatagtgttcaacgattacgtatgccattgtcttagtcccatagtccgctgtgtgattcgtctttgaaccatttgtctgctcgctctttttccgcatcggtcatgagtgggtatgcgatacgaacatatgaacgcctttccgtcacgaggttctgtcttgcccgaatgctgctactccagttccaaaggattggctggagcagattgtcgatgtggctttctcttgtgatcattctgtctctacccaaaagtcaggaaagaaaatccaaccatttgtcgtaacccaatgcccatactccgcatcccacgagcagaccttgaagcttttcttgcgtgttgagacgtctatgtgaccatacatcgtgatcagtgttccgtctttcggcgcgcctttgacttcttttatatccataattcgctccttatgccacggcaatagccaggtttccctggctaccaccaacccctactacgaggtttttacttgccggtcagcttgtcgatgacctgcttgccgacgtccgactgtgccagaccttcgagcatgccggcgatcttcgtaccgcccttcggaccgaacatgtccaggacgttggtcacgccttcgttcgggttacctgcattgctgatgaccttgatctcagcaccctgcagagccttcgcaccctcgacaccgatcttctcgctggcctcgacctgacggagatcaatcaggtacttctggtaaccctggttctcaccgatttccttagccagggtgatctgtgcctgcaccggtgccagctgcatcgccttctcggcttctgcctttgccgtaccctcagcctggataccttccgcgttcagcttctgagcagccaggttaccttctgcgaccagtgtcgtgcgctgcttctgtgcttctgcgttgatcacttcctgctggcgctcaccttctgcctgcacgatcgcgacgtccttgacctcgttcgccttgaccacagctaccttacgctgaatctccgaagaacgagttgcctcgacttccttgacttccatctgacgaacagtcgtttcacgctgagccgtcagcacttcctgctgcgaactttccttcgcgataccgaccgccttttccttctcagccgttcgctgaccgatagcctgttgggcttcctgatcacgcagctggactgtctgggctgctgcaatttccgcagtctttgcctgctgggtgttctcagcaactgcgacacggctgtcacgttcaattgccgaagtgcgcttggccatgatgttggcgatcacactcgaacccttggcatctcggatgtccatcagctcgatgttcttcaccggctcgacaccccagtttttcagctgctcgccgacttccttagtgaactggtcaccgaaggtagcacggtccaccatgatcgtgtcgatttcatgcgaggccagaatggttcgcaccgcaccctgcacaaccgaagtcagctgttccttcagttcatcgaagctcgacactcgctgcgccgcaacgttcgagtctgcgattcggaagaagctcgtcacgtcaacaacgaacggaacacgttccttgtcgtacgcctcgtatgcgctcaggctcaggtcgaagactgacacaggcaggatgatgcgcgtcagacccagcagaggaatccaggaaggccagttgtagtaagtgttgccaccgtcctggtccttaccgtacgaggtctgcgacttcgaacgctggagcgtgtgtacttcattcgccggaacgacgacacgcaggttcagcacccagaagatagctgcaactgccacgagtgccgcaatgcctgcaccaatgagaataaacatcagatcagatttccttctttatcaatgaattggttggttacgttttcaataacgccaggtacgtaaaagacctgtacatcgtcgcacactcggaagtagttcttgaagtcccaatacccttcgtccgggctagcgagcaattcctgcataagagagctgaagaagtctacaaactgttctgtcgcttccaggttcgcgtacttcgcatcttccttacgtggatcattataacggagcgccaactgttcgtcatacagttcgatctgctctactgtcggcagagcgtcctcggtaccccaaagtttcgcagcgacctccggatacttttcagcagcatacagccacaggttgaacagttcaaccgtttcgttttcagcgttaccggttactgcatacggcaggtcggcttcgcgcttcttgtagcgagactcgaaagcctttgcgagcagcacatagaactgtgcttcatctttcgtcagaccagaaagaatttccgtcttgtagttgtcggcgtcgttttcccacgacagtacgtgtacctgatagccgggcttgatgttcttgctcatttcagtccttgatagtaggtcttgagttcttcgaggaactgctgtttcctcaacagagcctcagcggtgttggcgatcatgcttccgacgaattccttcggaggaatcacatcaagttcgacggcgtagctgtactcgcagtggattgcccaggtctcccttctatggagaatttcgtaccaggcgtcttcgatgtctccgttgaagtcaccttcgaaatacttccacttttcgtaaccgtgaccgccacgaccactgatccagtatcggttgaacttcatggcgcagccttctcgtagaagcgaagattgttgtactcatcgtcgcttatacgaacgaccttcgatgccttggcttccgcttcggcgaggttcatgatacggcgcagctcagcgcgatcatcatcgtaacgcgacaggtgcatacgccaagtaccgaagccccaaccatgcgggtcagtccaggtctttctctcttcgatccattcgtcaaacggcaggatcgtttcgacttcccagacacccagcttggtcagccaacgattgttgcgtcgcttgttctcatcgacgtgccactgataacggtcacctttgtaggtgtcaacccatgcttcatgagcacgagcattgacaccttcacgagcccgctttgcgatatcgaagatgaagtcggcatcgaattcacgagtagccatcagtagcctcgctcgttgtatcgctgagtacgctcttccttggtcagcacacggacaaagtccacacgctcggaatagtacccgttggaggaaccgcgccaggtgatgtgaacgaattcgcgctcagttcggattcggtagaaggtccaggtgaccgaatcgtactgacgagtttcatcgctgttggattccacagtcgcagaacggatcggagaaccaaccagcgcatgaacgtcaccatcaatggcgtcgatgtagacattctcgcagcagttctgctgatggaacatcacgaagtgctttccacaggtggtgtggaagtcgatctggtcgttggtcttctctacgcgctcgagagtcagaccaatcaagtcgtcgagcggaacatgctcaaatgaatcgtatcgcattgtatttccttaccaatcgtagttgaggcccttggtcgggttcttaagaatgctctcacgccattcgtggaagctctcttcggtgtactcttccttgcaaccgaaaatggactcatagagatcaatccactcgacagcttgataacgctcgtagccgaggtcatgcaagcgctcttcacgggcgccatcttcgatctttacgagcatgtgcagttcgccacagccgtagtcttcgaattcgaagatgatgtcttccttgcagaggcgcttgtaggcagcccatcggtctttgaaaggaatagccttgttgctcagttctttgatgacagactttgcagcgtcatcagcaacttgccgaagagaaatcacggcgtcaattgcttctttgttaagagcggtcattacgtgtcctgaaggctttggcagcttgctcgagagcagccgtacggaagagggtctgtgcgatgttgagtgactcaatgccaggaatcaggttgagcatggacgcacactcgcgaaccacgcccttcgatttcaggatgccggtttcagacatcctggtcagctcatgagcaccctcagccagatttgcttcggcaaatttctttgccgattccatgatccggataatctcgctcactggcagacgatcgtgttgccgttggagtccttcatcagcaccgcgccttcgggagacacgatgtacttctgaccgtcgatacagcgagcctcatacgagacctcagctgccggacgagagatgttcgacccaccactagcccaggtcttgaatgccggaatggcaatcgcagccaggatcgcaatgatcgcaacaacgatcatcagttcaatcagcgtgaagccttttgcgttcgaattcttcatagcgttcaatgtaagcctcataatgttgaccgtgttgggtcttgaatttggaatcgagatggtctgcttgcttgaagtgacgattggctttcgcctcgtcgtcacgatcgttccacgcgttcatcaagctggcgaacacagcacttctcactgcctgcgccaactgatatgttgcgaagttcattttgctacctggatgcagtacgccttactttggattgtatagtaatagcccgcttctaactttcgtacttcctgtgaaagatagttcgcctgttggagacaaagttctttcgtctccaccggaatggtggtctgcgaaaccgaaggtacacagcctgtacctccgcacgttggtttgctgatcatcaccagaacgagcgcccactttgccaggatcattcgccgtactccaggcgaatctgacgcgccagcttggtcaggaattcgtgctcaccgccgtagtcctggaaagaaagacgacggtcttcaccgttgtgaatgcggaaagaactgccgtgacccttggtctggacttcggcaccggtcagtgtgaacggaatgtagtagcggtcgtacgccttgtcgtactctaccttgggcagcggtggaaagatctcgtcgagaatagctttcgcttcttcagaaaaatcgcactggtctttgccttgggcttcgagcagagcgtcggcgaggtactcaatcttttcttggcgtgttctgttcatgttcacaatgctacagttcgcctacgaaagaacaaccgtggtaaatattcgtgtacctccaaggactttgtaatggcaggctttaaacagacaattatttcgcacgcaccgaagatgtttcttacattcgacggtgatgcctacgatccgaacagccgacttctgacggctagccctcaggtcttcattgacgagtcgggcttcaactccaacatcatgctacacaatgagtcagaagtctacccagcctatcgcatgggtatcccttctctgattgacattgagcagacagatcaacgtagcacatcattcggttggtatggctatcagccgctcgcgcctacccgttggccaaagtctttcgtagaagtgcagcaccagtctcatcttgctctcaccgcagagcgaggttcctacactgttggcttctttgtcaacaaggcagagaaggaagacaagtggcgcgaccaagaacgcatcctagggttcaaccactacacacagacactcaacaagcgcttcatccgcaaggctgggtcgtttgacgtctacttccgtgactattgggcagctgccgaagagattcgtttcggttaccccggtggcggcgagattgtctgggttgtgcctgattggttctacggcaagaagaacttcgttgtctgtacttggaagatcacggagatcaatcctgacgtctatctcaacgaggcctatctttacgtcaacggccatctgtatggcagctattcgacaactacggctggcactttcccgaacagcacaacaaccactccaatcgagatcgctggcgtaatcaactcttcatcatactttgaagaccgtcagacgagcgacctgcaactcgatcagatgttcatcctcaacaaagcgttgacccaggacgaaatctgtcgcttgtatagaaagtctaagtcgtacgataacatcgcagtacaggctcaggcatcagcatactggccaatgacagatgtggaagacccagcagtcttcacgattaaggatttggtaggctacaatgacggtgtgtatcttggtggtgtgacacgcgtagcacgacagcagactgctccgagtcctatcctaggtggctcatctgtctacttccacaatggtggtatgggtgcagcccacagactgacgaacgttacaacctatacgccagtgttcaacttcaatggtgactggactgtagacctttggatgcagttctcaaacacggatcgttcggtactcttctcctgtcagaaggacgactatccgcatggtggtgtgctgattgaagttaatcgccgtaacaacaccaacgtgccaggtcacatccaactctcagtgagtcaggagttctacgtttcgtctcttctcaatcgagacaatggtcagcctttcaacttcaatgatggtaggttccaccacgttgcagcagtccgaaagggaagcactgttactctctggattgatggaatcaagcacggttcggttagtgcgcctgttcagagtctttccaacccaggtcccggtcaggtgtacttcatgggtgccgctccaggcagtctaaataccactggctacatgtctgcggttggtgtctacccttatgctctggatgatgctgagattagactgcgcaatctttactcgttgatctatcgtatccaaggcaatgtcacactgcaaggtaacccttatcgtgctactgtgcgtgctttcagtcatagaacaggtgcgttgattcgagagattgagtcttcgacatcttcaggtgactactcgatgacattgcatgacaactctttgattgacctgatggtcatgaacaagcaagaccctaatattcgctatcgagtctatggaccgattgcaccagctctttatgaggatgttccataatggcagttacccagtatctctacaccgacaccgacgctccagttctctacgggcagcctggggctttcatcacagtgctgaaagctgttcttgtgaacggttatggcaccaagcccagtatgggttggacgctagagtacgagtcaggaacgatcgcggtattccgtaactcgaccgctgcgggctcgacaggcatgtacctgcgagtagatgactctaactggcagtatgcgattgtcaaggcctacaagacaatgtcggacatttcgactggaactgatgctattcctggcacccttccatcatacagcaacacgaatatcttctggcctaagtcagcaaacaataacaacaacgctatcatgtggaacttcatcggtgacgagagaacgttctacctgaatatttgcccttggtcaagtcagaacgctaatcagtttgcaaactatgcgtatatctacgctgcgggcgattacgactcctacgttcctagctttgctcataactatttcgtggcaggaaattacgacggtggatattcatcgaatggtccttgtatgatcgacgatcagagttcctacgtatgctgtgctattggacgtgcgcaggacaatgtcgctgacaaatactccaaggcatgggtaagctacatggcaggtggtgtaccttccggatcatacaatcatcaagcgttctcagtctacacagggcagcgaatcttctatccagcatatgtgatggaaaatgctgttcagaccaatatcacaggtaagtggcgtggtttgtacggaatggtaggtcgctcaaacttcacatggaatgagaactacggcaagctcccaaacaacccaaccgggcctgatttgattcagttcacagtttccaataacagcagtcagggcgtctatatcttgaacggaggctggtaatgacaattttgattgagcctgcagtattcaagaaggaaggaacatacacttggagcgataggcgcaatcactaccttgtcatggatggcgagttcaaaaagagaccaaatgatatcggcgggctcggatacatcgcgggtatgctacctggaatcgtgacagtagacggcgcacccgcatctagaacaattgaacttcgattccgagatggtcgtaaggaaatctttgcaagcacggtttctaaccctgtaaacgggacctacctcattgacgacctcaacccaaagctcattgttgatctcattgcaagagagaaggaagacggagtctataacgatatcatcttgtccaagattcgcccatggacagactatcaaatgtacatccacggacctgatttccctaacgttcgaatcaagccaattttcaagcgtgtgtttgagctcaccggcggagtgatgccttatcaactcagctcagatatcactattcctgaaggaacagaagttacgctcgatggaaggttcttgacggtcgatgttacagcacctatggaaacagatctgtatatcaaggttcaggacacttcagggctttcggttgaaaagagcatcactgtcagttcctctaattcgattgtatccaagttcacaggaaattggatcctcgaaaacgaccctgtaacggacgaaccaagactgaggtcaaatcagattccgcattctggttctacctcttcgacttgggcagccgacaagaattacacgcagatgtcgttccgtatgttctcatcttccgaagcaggatacgatattttctacctatatgtcaacgattcggaacgtgctcgtgttagcggaccagctgcatcattcaactacagcactcctatcaatgcaggtgatgtgattagagtcacttatgcaaaggatggtagtgcaatcggtggcaccgatgaagcatgggtgtatatcgacggcgtctaaataagacgaactcaagagaaacaacaaatggcaaactcactatacgctaaagcacgtcaacgattcctcgaaggcgcaatcaattggaacacagacacgattcgtgctctgctcgttgactcgggtaactacactgtcaacctggctacgcacgagtttgtcacctcgattccttcaggtgcacgagttgcagggccaatcaccctgacagctaagactacgactgatggtgcagccgacgcggctgacgctgtcttccctacagtctcaggtgcgagtatcgaggcagtcgttctctacaaagacacaggtaccgaagcgacttcgcctttgatcgcctacattgacattgcatccggtctcccagtaactccaaacagcggtgacatcaacgttgtttgggacaatggtacaaacaagatcttccgcctatgaatcatctcttcgcataccaaccatacggaccataccctttccgcggtaaggtaatgatgttgcgtcagaaccttgagcctgtgattgacccaacaatcacagtgaattggaacggatatactcaggattaccgctgtcagatgaagattgcgcctaaccagaccaagggttcttatttccattctgcaagtggttcggctgtccatagatatttcacagtcactccctcaggtctaactctggtaaatgcaacagctgcatttgcaggcgatgttaatgactcttttgtcagcaatgattactatggttgggtagggacatcttcatcgtatatcaatgccttccgttggtcagaccacagccttatcacattgacaaagactggtctaggtacggtgtatggatgcacaatcaatccggtgaatggataccagcttgttgtcacacatagtgccacacctttcattcgttcttatgatctaagagacggttcgtatgtggatggaggggtggtgggtgctaactatcaatcttgtacctggacacctgacggtcagacggttgttgttctttcagcgtcgtctccatacgtctccaagtatagcgcgaacctagcaacaagaacaagtatttccacaaactcatcgtatggtaactcaacaagctatatgtcaggttatagctcttcatacggtcagttccgaggaattccgcattggtctaaatcaggttccgtcatcatggctccgggctccacgtccacaccattcctgtttgaggttgacactgttacaaacacagtgattccgattgctacaaatgatagcgcatatttgtatggtgctgcgtacgatcctaagaacaataaaatctacacctaccaaagccctaacggtctaacgaatagcccattcaggcgttacaacggaacaacgtatgccgaagagcctatgtcctcagcgtcatatatgatgaccggcggaaactcctcaggttgttcaactgctctgatggtagtgagttctaacactggtacgatcacaggaacagttcgagatgtcaacaacaacccggctgctcgtaagattcgcgcataccgccgttctgacggaatgcttgttgctgagacaacctcagacggaacgaccggcaactacacgatcatcactccgacttcggacactgaggcatacgacgtccagttcgttaccaacactggcgagctcttgaacgatctgttctacgcacgcaccacacctgcagcggtagcataatgccaagaaactttgtaactgtgaacggcactgtcaacattgatggtgctgctcgtaaaaaaggatatcacgctgttctcttacgggaatggcgccaatcccatttacatgactaaaggtacgagcagcgcagtagacggcacgtactctatcatcggactcaaggagcgcggacagcatatccttggcttggcatcatctgattatggtcctacatggctacccggaacagcttatacggttggtcaaacggtactccctaagaccgctaacaaccactggtatacttgcacaaccgcaggtacctctgatacgattgagcctaactgggttgttggtggagacttcacaattgagtgctggttgaacagagcttcaaacaacaacatgtctgtcatctcaaagctaggccctaacaacgatggatttgcttgcatcacacggggtggtgcagtcggtttcatggtcaatgggtttgagtacaactctgctcctaatgcaactgcaagcagcacgtggtatcatgttgcctgggttatgaccggaggcacaatgcgaatctatgtggatggtgccattgttgtagagcgtgctgggctgtcgattcttcctaatacctatgatttggtcatcggggcagacaacggaacaggtgttcttgctaacttcttcaatggattcattgatagtgtccgaatcactaagggtgttgctaggtactctggtaattcattcaatgtaccaacaaaggacttcccttccttcggaccagttgatcctctgtctcctgagactaagagcctgatgcgttttgacggtgttgaaggttcaaccacctttgaagatgagaaaggctttacctggtcagctcaatccactgtcgctctacagacaaaccaatacaagtttggtgggtcgtcggcatacttcaatagctcatatgcgccatggatgaaggttgattacaatgctgattttaacctcaatggtgactggacgattgagacattcttccgtcttgatggaaacacttccaatgtcacacctcacatctttgaggtaagcaacggccctggccaacgtttgaacgtctatcgagacaaccaaggcaacctgtcgttctatacagagtacaccaatggtgcttctggcgtccgtttgacctatccaatttctcctgacacatggtaccatgttgcgcttgtgagaagctcctcaggtgttaagatgttcgtcaacggcaccttggttggtacctacacaggtgccgttattcctgctgcctcaactgcacagatctacctcggaaactactcgttctctccaaacaccaacgacggtttgaatggttggatcgatgaattccgtttcactcgtgcagtcagatacacatcttcgttcactgttccgaccactgcataccccagagcaggtggcgacccgtcctataacaacgtatcgtctctgatcaaattcaacgattcaatcgttgatgaaaagggtccggtttggacattcagcggtgacggtggcccgagacaatgggcgtacaagttcccacctgggtctctctaccttgttggtagtggttcgatgtccacaccaaattcagatagcctcaatctagtttccaagactagtttccctgatggcactgcaaagtggattgacagcggcgcaacggagtcacctattgcaagaggaccgttccagattcctgatcctgttgcagacacgagcacaatcttcctttctcgtaaccatgagctacctccacaggaagaaatgacagcagctagggctgtagtatatggaggctgtacctcggttagtagcaaatttgctggatacaaagcgatcaagtttgatggatcaaccgcaggtctctattaccctgctgtagcgcctggctcaggtgattggacagctgaaggctggttctatatggacgccttgtctccttcatcttcgcaatgtgttctatacattggcgacattggtagcaacaatcatcgcattcagatgggtcctactgctgcgaatggaatcgaaggttacgtaagtgcaggtctcaatggtggtacatcttcattcgccgcatcgaatcctgtatcaggtggatctcttattcaatcaaacacttggtatcacattgcttttgaaaagtttggaaacaatacatacctgtatctgaatggaacacaggttgccacagctacccttgtagccaactattggatggttcctgcttcaaatgccaacacctatatcggtaccggtcgagttgcaagtgtaacaagattcatcaatggcagaatcggcgaagttagagtgagcaacattgcgcgctaccaaggcgtcgcaagcttccaaattccaacggcgccttacacggtttgaaacacggttaaatatctcagtctatagggctgatatcttatctgtgttgaacgcgctatctgaaaatctaaacgacgccgcaggtagcttcgatgccacttgatttcattgcgtctaatctaacccataccaaaccagtaggaactctggactttgtaagcccggaaggaatgctatttggtattgagattggtgatggtggcgagttcaagattgccggcgcacttacaggacaattcctccaagcttcttggggcggtaagcctgtctatggtcatcccgctcatgttgttgaaacaacctggggcgacaagacatacatcggtgcaggtattgcgcgtcgtggtcatgtcaacattccgaccattgttcagcaacagatcatcaagcctgccggttttgatcagtcagaattcggtgtagttcagaccaacccaatttccaagtatgttcgccctacaggtggacagatcgatacaacttggttcggtgcaagaggatactctgctcctgtaactgctgttggtgcgtcttggtctgaccagattgtaatttctcctcttgcgattgagtcgacgctcaccttcggtgatgcaaagatcgtccctgaacagaacattgaaccttccggttgggtgtcaactcaattcggtaacagctatgtcttgcattggtacgagtacgctccgccaatgtggactcttgatggttcatgggctggtaaggacgaatactttgacgctaaggatggtgtaatccatgccttgtggcgcccacctgcagattcgcagacaatcgctcctattgcattcgttgatagtgcaatgggtagtccgcgcgtacgtcaagctgtaaagcctgagggtattgcgtctactgtcaacttcggtatcgctcagctattcccttcgatctgtaataactggtcctatcagggcgcaaccaaccgcattccgatcacgtttgacaatgttgctgaggcatacccaggcaaccgcatcccgattgagttccgttgcggatcgtcaggaattcgctactccgacttcgaaggctttatcgaagcgcgtgatggtgctgaactccaggtcaagatgtatgacggctatctgtcgctcaacatcggtgaaggtgctactctaagtccaattgatctgacgacacgagtcagcatcccgctcaacttctatgatggtgcgagctggattggtggccgtggatgcgttgatgtatcaggtctagtcaacattggctcgagcggtaacgctacaccaagcccaacgctcaactctgttcgccttcagaacagtggtgatccgaccattggttcttcggttggtactcctctccttgacgtatctggtcaagacacattcgagtactcatggacacagaccctcaacggtccatggtacgacaacgactttacagatgcgttccttgagttcggtgtattcttcaaccgtcctcatagcaccatcacaacggcaaccggttactgggaatacggcactccgttcaactccaataattcaccttggctgagcttcagaatccctcgcgatcctgaaagtaaaacagtcccggtctatgcgcgcgttggcaatgagacaatcaccctccagccatttgagaagccagctggcctcgatctttttgctggtggtaaccgtcttcgtgttcgtttcctacgcaacggtctaacgcttactcttgagatctactacggcgacactctgctgtctaggcagaacccgcctgtatcctggccaacaagcgttgtccctgtttggtactaccgtaactacaacaacccatcctcgtacattgaccttgcaaacatgctgggctgtacggatggtctgctgacaacttacccagctaccaacttcaacttcggtgcaaacttctacgatggtcaatcggttgcgcttgatctgtccacgtcgacgatcctgccaatcaatagcttcgccgaagatgcttatctggctgcggtacttgatacacgtcctgtcgtaacattcccgatcaacgtctatgaaggcgcctcggtcgacctagcactcaacaccacgtctacgctacagcctgtagcatatgatggcggtgtgttcgactttgatatcaagatcaatccatctgcagacctcctgtttgcaatggcagatggtgcttcagcttcgattggtctgtcaactgcattgcagcttggcacagtcagcatgttcgaaggcgcggcagtttcagcgtcgcttgatacactcgaaaactactacatctacgatggcgcgttcgtcgaagtcggattctcgactgaaaccacgatgccaatggatggttacgccggtgagacggtacaggctacacttgatgttcgtccatcacaaggtatcggcactctcggtatctatgaaggtgcgaacgttgtcacgtcgttcactacgctgcctcaggtactgctgtatccaaatgagatcaaggatggacactcgttcaactatgacatcctcggcttcatggggattgacctcaacaatactgcttgctgcccaatcaaggacaatccagcacatattgaactgactgctggacctgcaccagatgagcgttacgacggcgacaagactgtcttcactgctgaactgtccacactaccacgtttcagcctgaatgtctacagcggtgagcgttttgactctgttgatcctgagtacctgacgttcaacttctatgaaggctcaggtgcaatcgttgatcgtgtcgagtacagccgttacaacttcaacctgtgtgagggtaacttccttccagatggcgatcacgtcaacgttgagcttgtcgctaccgattcgctctgcaatgattcgactctcatcttcgatggcggttttgttgatctcgacattcagaacaatgtgcaatttgctgtacctctgcctacaggtgaatacctcgatgcagtggtcacaatcgacaacgcctggatcatcaacttcctgcacggtgaatatgtacgtgtatcgaatcccgaattcccgctcaacttctacggcggcgaaatgtcatccgctaagtttgaagaggaagacatctacggcttctccggcgagtatgtttcggtcaacctgtccacagactacgacgtcgagttccttgaagtaggctgccttgacaacgagtttgttcctgcaaacgagaacggcgaccctgattgggacaagttcaatcctgttccagttgagctcgacttcttcagccactcaatcaaggctcgatgcttctaagatttctttagtaagtaaccagtaatcaaagaaaactttacaaatggctacatgtcttgaatcaattgctgcgatgggagggattggatctctgcaggagatcttccctaacactgtcatgcctttcagcgtgacatcgacggctaacaagctgtttaggctccgatcgcctcagttccagtctgttcaatttgcattcaaccttgcaggtaactcctggaacacacagatgacagtgttcagttggaacggtgcaacggcgaccgcaattggttcggcgtctatcacatcagcttttgtcagcgttaccattgacttccctgtaggtgattacatcatctgccttcgaccaggaactgcaacacctcagtcgggaaccttcactgcttcattcacaggctactcacagacagcaaatctcgtggtagatatgtttggtggcgaagagtactcatgcatcgtgtctgatcctccgagaccgccgcgtgagtgtaatgaggccttgttctttgaggttctcgaaggagaactcccacctggcttgcagatggattttcaaggaacaatcactggccttttgccaaacctcgattgccttgaggacacacctgcccctgctgtgaactggtactttaccgacaacgacggtacgtcatggccttggggtcgtcagtggagattcaaagtcaaggtatgggtcaatggtctgaaagacacagccttcgatgaagattggttctgtgtcaagatccacaacaactggacattcgaccttgacaacttcatggaacagagtccattccaaagagtggattatgtccgtgtcgtagagccaccgaagccactcgaggttgagtgcgcaccttgtgctcagatggaggaagtacagttcatccctcagccaattgacgctgtctgtgagccttgccaaaactctacggttgccaatcaggttgagttgattgcgatcccggttgagcttgcaggtatcgatccgaacgatgtcgtcacctggtatgacttgaacaaggacactgtcttcaccaacccataccttgagaagttccgtgatgatttgagagactcacaagttttcaagatcatcacaaactatcgagagaccaatccttacgagagcctcgagtacgctgtagcatccaactatcaaaactatctccagcttgctgagattcgtcttgaccctacaacggatccaaacaacctatctgttttgatggctcaatggcgtgactacatgaatcaatcgctgccaaccacaccaattggatacggaggagagactttcagtgtcaaccttgcctgatcaatgcgaaccgtgtcctgtaatcgagccgtttgtgcctgttgccaaactgccggacgtgctttgcccttgccctgaagaagtcgaaaagccttctattcttccaaccatcacgacacaggaagtgatcacctattgcttgaaggacgcacttcacgcaatggcaacacaattattctgtgatcttaacaacggtccaaagggctgtaggtaaatattcaagatatgggactaccaacttgccgaatgacagatatgactatgggtcacggatgctatccgccccagaaggtcttacaaggttcacctacggttttcatcgaaggtttgcctgctcacagagtcggtgacgcgattcagccacactgctgcgatcactgtcaccctagctttgcggcaatgggttcctccacagtctttgtcaatggacaaccactcatgcgaatcggtgattctgcaaactgtggttccaaattgatgacaggcgcaatgacagtattggcaggctaatggctgagaacaaaatcttttccgacctagacttgaacatgatcccgaatcctcatacgggtgacctcatgcctaaggtgaatcaagaagctatcaaacgctctgtaaggcatgccttcaagttgaacgcgtatgatatcccattcaacaactcaatcaagtctagcctgaagcactatctgttcgagcagaacacccagctcacacgcgctgcgcttgagactgatctccgatggctaatgaccaaggtcgagccgcgcatcgaagttcagacgattgatatcgttgcgcctaagaacaaagatggctttgacattaccatcacctacaagatcaagtcgatcaataccatcgactcgtttaacctgattgtcgagaaaatccgatgaaaaacttgcctgtccagtcgcttcaatttgaagacatcaagactaacttcaaggaattcttgaagggaaacgatcgatactctgacttcaactttgaagcctcaggtatcagcacgctgctcaacgttgcgtcttaccaaactcactacattggcttcttcgtcaagatgctccttgatgaagcgttcattgactcggctcacactcgccaggcaatgcttagccatgctaagaagtcctcatacgttccaaagggtaagcaatctgcgaaggctgaggttgttctcacgctaaccgttggaacaaacaatgagcctctgagccgcaactatccgattgaacgtggtgctactttcaaggccacaaacgatacacaggaccagcgcatcttcacggtgcttgatggttctactatctacaatcgctcggttaccggttcgactgctacatatacatcggctcctctccgaatctatgaaggccaattccgctcctggaacttcgtagttgatacgagcgttcagaaccagcgtttcatcctaaaggacgagatggctgacgtcgatactttccgtgtgcgcgtgaaggagaatgcatcgtcgacagtgtttgaagagtacaccattgcatctgacgtgcttgatcttgatccgacgtccaaggtgttctttgtctctacggacgagaacggttactatcagatcttcttcggtaacggcgtctttggtgttcagcctgaaaacggcaacgcagttgaactgagctacatcagcacaaatggcgagacaggtaacggtgctaaggcattcacctaccagaacgatattcagaatgttgtctcgacggtaacgaccaattcggtttcggctggtggtatggaaccacagacgattgaggaacttcgattcgctattccgaacgccaacaagcgtcagaaccgaatcgtcatctcgtctgactatcgtagcatcctccttgacaagttccgcaacgtcgattcgctcaacgtttggggaggtgaagagaatgtgatccgcgactacggtaaagtctatatgtccatcaagcctaaaaactcagacaagctgacttctcttagccgcacgcaaattcgtcaggatatcgtcaagaagtatggcgtggtcggtatggacgttgtgttcgttgatcccgatttcatcaacgttgacctgtcaatcactgctaagcttgatctccgtaagacgactcgctcgcagcctgaactattcaaccttatccttgaacgtgtcaaggagtacaacgagacctacctgtccaagtttgatagcatcctttccgacgtcgatctcctgtcttacatccgacagggtgagcctgccattgtttcgatttactcttcaaagattctgtctaaggatcatcagcaccttcacaactccactgcctcgaacaatgtggtgtttggtaaccgactggtcaagggaacaatcgaatcaggtgtgatcacctatggcactgagactgtcaagttgattgatgacggtgcaggcgttcttaagttggttcgagtctctgatagttcagtgattgtagctaaatcaggatcagtggactacaccggaggagtcgtaacctatgcactgcctcaggctgctaaggttgctggctatgagacaagtacatcaggtgttcttgagttccgtgcagtcccttcggttccagacatcaacaccaacatgaacaacatcgttcgtatcgaaaccactaaggtagccgctggatgagcacactaatcccagtactcgcgcataagcttccagagtttgtgcgtgaagactatcctaatttcgtacaatatgtgcgagactatctggcctggatggaacaggacgacaacttcttgggcatcattaatgcctggaaggaaaacatggagccttcgcttcaggtcgagccttacattgatgcaatgctcactgacctcgggttcgtctcaggtcagaacctcgctgtagacaagaacctgttgatccatctgttgcaggacttctatctcagccgtggtactgaggcatcgttccgatttcttttccgaatgctgttcaatgccgacgttgagattcgctaccctcgagagcagatgctcgttccgtcattcgctgagtatggtgagcgtcatttcatcttcacctcagcgaacaacatcaacatgcttgacttccaagacctcgtactctatgtgcgtgagaatggtggtacgttgacagggctgacgactaaggtaaaggcttcgattgagaacattcagatcgtccatggctcaggaacaccgtatttccgaattgagatcctccgcccgacatttgaatttcttgtcggtgaagctgtcacaatcatctcgggcgactacgctatcacggagtttgtgaagcctgttctcgcaattgaaatgaacactcctgggtctggctacaaagcaggtgaagtgatccagatcactggcgccaaactcaatggtaacgcattcatcgagagtactcgcaagggcggtgtcagtaatattcagatcgtatcatcaggtgccaactactctgtaggcgatctaattgttgctcgttctgatgatgacggtttcggtttctctgcttcggtcacacaagtcgatgctcaaggtggcatcacagggtataaggtaatcaatgaaggctacaactacgcaacacttcctaatctttatgctcagagtactgtcccagcgagccttaaggcgtcgggtggtaacgtgggtgcaatccaaactgtcaaaatggaaaacccatttgtagactttgacaccaccgatatctctatcgtaagcgctgaaggaactggtggtacattgacagctaaggctgtcagccgttgggagactcgcgaatggactgaccgaaaaggcttccttgcagagagctcaaccctgattgactctgaccgtgtgcagcagttctcatacaccatcgttagcccaatctcatcaagcctttacgacagctttgttgcagactatctacatccagtcggatttgttcgttcaagttcctacgagattgtttctaaccttggcttaaatatcacaagtggaacgcctgcaattggtactgagaccccaatcgtgtatccggcagttctaaatctcacgtttgtgtctgagtacgattcgttcgagaccatcacactcgtaacagacaccggtgacgagttcggcaccaacctatttgaaccaatcctaattgattgaggatctaagaaatggcttacagcttcacgccttctatcaaaccatatgtgatctccagcttgtacgaggccatgaagtctgctcgcccttcggctagaactccttcgacttcctactcgcttggtgcacaggtttccaacggaaataaccgctacatctgcatgcaggaaggtgtcacaggtgcaggtaacggtccttccaacaccactggtgcggtctatgacggcacggttcgttggctcgcccttggtgcagacaatgtccaggatggtgacgtcatctccaacctctaccttggcgtgggcaagcagacagaatgggctaacccttctacacctgacgcaccagacacatctttgactggacagaatgaggcacttgatgacctcactgctcttatcaagattgattcttccaacctgcgacttggtctgaagaacaacacctggaccactggcacaatctactcgcagtatgatccggatgtggttacctatgctactccgaattatgctatcgttggcggcacctatgtctacaagtgcctcgataacaacaatggtatcgcatctactgacgcaccatctggcacaagcacttctctgatcgagactgcggatggctatatttggaagtatgtcggttcggtatcaggccctgagatgttcacttttggtacgaccgaattcgttcctgctcctaccgaagtcaatgttacaacagtgcagggtgagatctcgtcgttcactgatatggtatccacttcaactccgtttgctgctgctgatacgattcgcgtcgtagtacagggtaacggtacaggtgcatcaggtgctgcacgttcaacaacttcgggtgcatcaaagtctttgactggtctgtatgcaaccgcaggtggttctaactacaccgaagcctatgcgatcgcatataaggatggtactccaggaacaggcgcaactctggctgcgacaattgatgcaggcaagattgatactctgaccgttagctccccaggttcggcttacacttctgcatcagtggttatcatcggtgacggcactggcgctgaagcaactgtcgttgtttcctcaggcattatcacagcagtcaacatcactgaggaaggtagcggttacacctgggcaaaggcattcatcatcccaggtacggctggtggtgttgctaaggcaaacctgtctcctccgggcggtcatggttctaatctcgacactgagctgggcatcgcgtctgttctggtttcggcacgtctttcggcgagcctgtctggatacattccaaccgagcctaccgatactgacggttcgttccgtcaggtgaccctggtttcaggtgtccgtggtacaactaagaacgcactcgcctacatcggtccatcgcatccggattttgtttctggatcacaggctaaatatctcaagggcagcggatttgttctttacatgaacaacatcgtagctatcgaacacacttcctcgcaggaagaagtgatcaagatctcaatttcgctttaaggtaaccaatggctaagcttgacctaaatcgtgctccgtatttcgacgacttcgagccgaagaaaaactttatgaaggtcctgtatcagcctgggcgtcctgttcaggctcgagaactgaatcaggtacagagcatcttccaacaccagattgaatccttcgcgaaccatatcttcaagaatggttccaaggtaagcaatgcgcgtacctccttgcagtcgaaggcttatgtccgactgaccggaacgcctgttgtttctacctatcctgagaatactcgcctgcttggtgagacctcaggcatcaccgctactctcgttcgcggtgttgacgttgaaggcgacgatccggcaactctctatgttgtctatacaggcacagcaattgacggtgagacctcggtattcatcccaggtgagaacatccgtatccttgacgtgaacagcgttgaggtcggaactgttactgtccgctgcccatcatgcccaggttccggtctgagcgacactctacctccaacaggctggggtcagttcttcaccgttgacgaaggcatcttctatttcgagggaatgttcctcgatacgactcgccaagacatcatcgtggtcaaatacctcgagaagaatgtgagtggtgagatcgtcaatttctctccatgcaagatcggtctcgactttgttcagagcgtgatcacctatcaggacgacagttctcttctggatccgtcgctgggttatccaaatagcactgctccgggcgctgatcgttaccaggctaagctcgtactgaccaagcgcagctataactttgaggatggtgaaaacttcattcctctgtgccgccttggcccaggcatggtcattgagttcatgaagactgactctgagtatgctgacctgatggataccatcgcgaagcgtacctatgagactaatggtgactacaccatccgtccgttcaaggtctcgttcttcaatgctaagaagacctcagctgctgatcctctgggttggtctgtcgatggcgatgaagactcgctggtctcggttgttactccttcggttgcatacgtaaagggttaccgtgtcgagtctatctccgacacccctgtcgtattcaataaggcacgagacaccaacaagctgtcttcctttgtcaagcacttcgatggtcgcagctacatcctcggcgtgcctaagggtgcaggtatctgggcaaacgcaaacaccggtggaatgatcaccgatgcaactgtcacgatctatgatcaggctaccacaggaaatgctgctgcaggttctccgattggaaccctgaagatcagcgacgctgcctatgtctcaggaaacctcgctacaaagaacgctacctaccgttactatgtctatgacattgcaatgaacgcaggcaagaagctgtccgacgctcgatcctttgtggttgcaagctctggcttctacaccaacgcggtcattgactcggttacagagtcggttgagatctacaatgcgaaccagactgcgctgatctacaaggttgatcgtgctaacgtcaagtctctccgttccgcagaagacccactcaacggcgcaatgaacgtcgtggttcgtcgaaagctcaacggtgttgctgacggatcgggttcggtcaccttcacaacttccgctaacgaatacttcgacaacgctggttcgtcgatgcttggttggtatgttgctggtggtgtgacgacttccttcatcccaggtccgctaaccgcgttcagcccaactagcattaccgtagcgctcggttcaggcgccgccggtgcatcggtatatgtgatcatcgacgtgttgaaaacaaaccagacagagcgcacgaaaacgcctcagaatctgactgttacaaccaacactgctcctgacactgctatcggtgcagaaattgttcttggtgtgactgacgcatatcgtctgaagagtgtcaagctgtttgttgaaggttcgcctgatacaccggtggcagacatcactgacgaatacaagatcaactctaacatcactgacaccgcatatcgcgagtccaagattgttcgtaccaaggccccaagcttctcgacgaacaactcgtaccgccttgcgatcaacttcgattatttcgagcacagcggttcacagggcttcttcactgttgactcctatgcaccggcacttaacgctgacgactcaggagtgacctatgagactcttggtggatacactgcttcgagtggtgttgtttatcctctgtctgcttccatcgacttccgtccagacatcctgggaacaaacccagtaacatctgttctgccagctaatgaaagcaccgcaatcttcgacattgagtattacctcgcacgtactgacctccttcagatcaacaaggatggtttcatctacgtaaagaagggtgagccttcggatgatccacgtccgccgaagactgacgacaacgcgatggcactctatgagatctggctttcgccttacacctactcgttgaacgacgttcgtaccaagttcatcgagaaccgtcgctacacaatgcgtgacattggctcgctcgagaagcgaatcgagaacgttgagtactacaccactctgactctccttgagaagtcggcacaggacatgtccatcaaggacgctaatggacttgaccgattcaagaatggtctgattgcagacaacttctctgacttccaggcagccgatctgaccaacgtagagttcaaggcagccgctgaccgaaccaaggctcagctgcgaccaagcttcaagttgatgaaccgtaagctcgtgttcaatgcagctaagtcctcaggattccagctgtcaggcaacatggcacacctaccgttcactgagagcgttgcaattgagcagccttatgctaccaagcacctcagcgtcaacccatacctgcagtataaccaggctggtcagatggtaatgtcgccaaacaacgacacatggtccgacacaacgatgctgccacagctcatcactaacgtcgacgccaacgttgaagcgatcaagaccattgttgaacagactcctgatcctgcaccaaaccctgttgttgaagagaaggttctggcggttgactggggtacgcacgtcgacctcaatactactgtcctaaataaggtagagactaagccagtaactggcggtggtggacgtggcggatcgccgtggcgcaacctcaatgtcttcacccgagctaactaattaaggctagaaatggcaactgtagaatcaagaactgatacatacgatctgggcgatatggttaaggacgtccagatcgtcccttacatccgtagtcgtagcgtcgagttttacgctaccaagatgaaggcgaacactcgcgtctatgcgttctttgacggtcaagccgtttcggagttctgccgagatattggtttccagcttagcgcgtctaatgctggaactgcctcgcagcttgttgagtttggctcgccactgattacagacgcaaatggtgagctccgcggtgagttcaagattccgggcggacgtttcttcactggtgagaaggagtttgtcctttcggatgacccaggactcactggcgatgcagacatgcagactacgagcgctaaggctgcttactttgctggtggcgttaatgtcacgaagcagaacgtcacactgaacgtagtttcaactgtcgtcatccctgatgcggtcaacccagcacgtgctgcacctgaacctgctccagcacctcctgctccggatccttcttgcttgaaggagatgaagaagtatcacccaaagaacttcaatgagatctgccaatgcgttgcaggtggtggaacctatggtgcctgcggtgaccctatcgcacaggcattcattgtcaacaacgatatgttcatcagctcgcttgatctgttcttcaagcaggttgacgtcttcagtgaccgtatctttgtccagattcgcgatatggtgaacggttacccaggtactaacatcatcgctcagaagtactacagcccggatcagattcagcctttcgcgtctgatgattcgagcaaggcatttaaggttgttttcgatcagcctgtgttcctcgagtcgatgacgcagtactgcttcgtcgttggtggctattcgcctaacactcgcctctgggtctcgcgccttggtgaggaagtgacgaacatgccaggaaagattgttgagcagcagacgaccactgaggtcagcttccgttcgctcaatggtacgacctggaatgcagagcagtatgagcagatcaagtatcgtctctacaaggcaaacttcactcctggaaccatgagcctcgtattcgagaacgctcatgaagatgaggaagtgatccttcctgaaaacccattccagactcagacaggtcagtcacgtgtgcgtgtgttccttcgtgatcatggactcaccacaggtgatcgtgtctcgatgagcctgaccagtgatacaccgttcacgattacgatctcggacttcgttccgcaggtcggtcagacgatgcacaccacaacaggcaagggtgtcatctcagacatcaagtcgacagctacagctaatcagtacgaagtgacactgaaggatatctccggtgtgttcactgcagggcagacatactcgtgtgatgcaaagactcgcgaggttcgtgactggtatctgattagctccatcgacaccaagaagccagcgagctacacactcaaccagtgcttcggtaccgttgtgacaaactcgtatggcgcaaagtatccaggtggaacgattgcaggtattcctgtctccgagttcaatactgagcacgtcactggttcgctgggtcactcggttgttgaagtttgctcagttgactcgttcatcatcaacctgacaacaccagctacgatgactggtcgctttggcggaagcggaatcgtttgctataacggtggtggtaagtttgacgtgttcaacgtttctggtgcttacctgccttaccgttcctctgagaactggacgcttacaggcgttggtcatggcgacaccggaagcctgttcgaggcagctaactatcagactcaggcaccaatcgtgtttgctccacaggaagacaagttccttggtcagccgcttaagattgcttcagcaaacaacgagcagatcatgcttggtacaggaaaccgttcggtgactgtcacggcgtcgttcaactcgactgatgctaccagcactccaatggttaacatggacaccttctcggcgatcatgatttccaaccgttccgagtggcaggacaagtcgaagatgacttcgattccatacgacgctacccagcctgtatggcacgctgaggaagagattgtcaatggttccgagatctacaagtatgtgacacgtactgtcaaccttgagaacgctgcaaacgacctctacctgtatgttgatgcctacaaggatctaaacgcagacttcgatgtctacttcaaggttcttccggtctacgcttcgggttcaattgaggcacgtccttggatcaaggcaaacgcactgaccaagtctcgttcttcagttgacacctcggatatggtcgagtataaggttgtcgcttctgagcactgcaccgcatacacctcggaaggagtcaactatgcaggttggtcagaagatccattcactgcattcaagatcaagcttgttggtcgttcgaagaactcctctaagccaatcctctttgagtcactaagagcaatcgctatcacataatggacgcaaaagtaagagactatccagaccttatcaagcgcggaggcggcgtggttaacaccaatcacgacgagtacctccgcgctaaggctcgtttgaaacaagcaaagcgcatcgacaatctagagagcgaggtaagggggcttcactcaaaactagacatcctgattggactactccagcatgatcaatctaaatgacatctcccttcgtctaatgtcgtatcaggcaactgtgcgacagacgattaccgccgttcagcaacagcagtgcagttctgacttcattgaccgtgtcagcattgccctaaataatatcgaaaatccgtctaggaacgaaacatggcaaaactcaactcgcgagaagagttcaccaactactgtctgagagctctcggtgcgcctgtaatgcgcatcaatgtagacgaccagcaggttgatgaccgaatcgaagacgccctagacctattctgggaatatcactctgatggttcggaactcgtattcctgaaggtacaggttactgagacgatgaagcagcagggttacctccagcttcctcctgagactcagtctgttctgcgcgtcatcaatgcaggctcgggtatggatggaggcggaaacggtatcgcaactatcaacctgcagtatcagcagtacatcaccgatatcatgaaccctcgccgcatcatgcaaggtgatggtctttcagcttactacatcactcaatcttacctcaacactttgaacgacacgttctctgctgaggacagaatccaattcaaccagcactacgataagctctatattcttggtgactgggatgctttgactgttggatcttggatgggtattgagtgctaccgccgtgtcatgcctgaggtttcgggcgatgtatggaacaaccgctggctcaagaagtatgctactgcacagatcaagaagcagtggggaacgaaccttgtgaagttttccaatgtccagctacctggtggtgttcaattgaatgctcaggaaatcatggatgaagcgaaggaagagattcagacgctgaagcaagaacttcacgacatgtatgaagagccaccgaatttcttcgtaggttaaatatctcgaacattaatcatttcgagaacctatcatggccttgaaccgctacttcaacactgcgaacgagaattccgaacaggaactctttgaggatctggtcatcgagatgatccagatgaacgggcaggacgttctctatattcctagagaaatctttgaggttgatcctgtccttcaggagccgaagaagactgtcttccgtcgcaacttcatcattgaggcttaccaaccggatggttacggctatccgggcgagcagaacatcatgtctaagtttggcttccgagtcaatcagactgctgacttcattatgtccaagaagcgtttcgctgagcttggaactggacgagagcgtccgatggaaggtgacctcatttatgtcggcaatccctacgatccagatttctctctgaccaacactctgtttgagatcaatcaggtatggtacaaccagcctgactggcagtttggtcgccacttcacttacaagctggtttgcgaaacctggactggttctcgtgagaagttccagaccggtaagactgcacttgatacaatggagacagtgtctgatgacagcgaggagccagcacgtgtcaatgaaggcatcatctctgcgaagaccggaatcatcgttgaccagtttgatcgccacaatccattcggtgacttctaatgtcaagacctcacttctattggcagacaactaaaaagctgatcgtggcatttgctacgatctttgatgagatcgaggtcaccgatgactttggtcgaccttacaaggtacctttgattttctcccagaaagagaagttcattgaagccatctactccagtaagagtatgggcgagaccgacattgatatcacattccctcgaatgggtttcgagttggcgggtatgaactacgctcctgagcgtaacctcaacccactgaaccagattgtcgatcagatggatgacggtgaagaggtgatgacctacaaccgagtcccgtacgatctacagttcgatctctacattggtgctcgtaaactcgaggactctctaaaggttcttgaacagatcattccgttctttactcctgagctgtctgtcaccatccgtgatagagaggacttccagcttgagactgtggttcctgtcacattgaactcgacgtcggtgaatatcgactatgaaggaacctttgatacaaagcgtacgatcatgtggaccctaaacttcaccgtgaagggatactactacccggaccgtcgtgctaccaacatgatcaagcaaacgattcttaactttggtgacaaagattacgaaagaatcttctctaaatacacgagtacagtcacaccaatcgaagctggtcctaatcagattcacacggttgtggacacacatggatcacaattcgaggaataagaaatgacgtttgaagaatttctaggtgaagccatcaaaggatggaagcacgcacataacgaccttgcaaagcatcgtcgcgaacagtctcaggcaggaaatgaatggcatactcatgcgctgaacaagtctggtaaggaaagcggtatgcatgatgctcgtaagtctcacgcatcagaagcagctgctcgtgctcaccatgaacagttgaagaagaataacccgaactcgcatatcgcgcacaacctgtaccacaacggtaagcacgtcggaacgatgtaatgcaaaatgcccttgatgcaatctcacaatctctaggtgccgcaactcctgttgcgaccattcctcgcccatctcaagaaattgcgaaggttgatgagttcaaggaagcacctgagattgaagatgattatcaggaggctcgttctaatctgaaggaactaatcactcaggtaatggaatatgtacctgaggtagtagaactgacacgtcaatcacagtcagacaagatgatcaatgcgatggctaatctgctaaacacagcagccaatctcaacatcaacttgtctaagctgtctaaggacatcaagcaagctcctaagggtaagggagtcgttgccggctctccacaggaagaagttgctcaggtatctaacactacgaatattttcgttggttctacagaagagttcttggatatgatgatggagaaggataagcgtgccaaggaagctgcaaaggcagcccaagcagcttccgtcatcgaaggtgaatgcacgacagtagatacgtaacattccattggactcagaagagccttcggagcatatcctcacttcgttcggaattcggagactctgacgagtctcctcatagtggtcataatgtctttctgaaccttgaattttaatcacaattcggccaagctggctcaaatgatgattaagagtttaatcacaagactggtctgaccctatacaggacacggggaatcggtggcgccctattagtcaggattggtgcaattaagcaatcccgccagtccatatgccgcacagtctctgagcatatgaacacaccagttgcaaagtaagcagagctggtcaaactttaagccgtaaaggctctttgaattgtctctggtactacactcaacagactctatctcacgtcgcgactacgcttagccgacggctagttctgatctaattttgagaaacaattggtaaatattcttacagacatatggtaaatgatttcctgtggttggacaataagacttggaaacaatatgaaattcgataagacataccatggtgaaatcaatcccatggatcagtacaatggattgaacaaccttaagaaggcaggcgtcaagattcagatgactcctgaacaggctgaagagttctacaagtgctcacaggacttcgagtatttccttgagaactatgttgagattttgagccttgaccaaggcactgttccgttcgttccgttcggctatcagcgccgtgcaatgaagaagatcgtaggcaaccgattctcaatcctgcgatggccacgacagatgggtaagactacgacagtagcagccgtcctgttgtggtacgccatcttcaacaagaagtacaacatctacgtgctggcacagcagcgtggtcaggctatggaaattcttgatcgtatcaaggaaatgtacgagtgcctgccatggtggttccagcctggtattcacacatggaacaagggttcgatccagctgggcaacaagtccaagatcgtgacagcagctaccggcggttccggtgttcgtggtaagtcggtcaaccttctgtatcttgacgagttcgcatgggtcgataacgaccatgagttctacacagcaacctaccctgtcgtctcttcaggtgacacgtccaagatcatcatcacgtctacgcctaacggtatgaacctgttctacaaattgtggacagaggctctgcgcggcgacaacaactatgtctgggacgatgctttgtggcacgagcatcctaagcgagacaaggcttggtatgacgagcagatggctaacatgtctgagcgtcagttcaatcaggaattcatgtgcgagttccaaggttcgtctgatacgctgctctcgccggcaactcttcagagactggtcttccagaatccgattcgtctgcttggtgatcataaggaattcaagatctatgaggatccgattcctggacacttctacgtcatcaccgttgacgtctcggaaggtgtaggtaaggactactcagttgtttcggtcattgacgtcaccgaggcgccttataagcaggttgcaatgatgcgatcaaacatcatgtctccattgctgctggctgaccttgttgataagacaggtaagaagtacaacgatggctatgtgatcgttgagtcgaacacctatggtaagcaggttgttgatgccctgtggatggactacgagtatgagaacatgcttctctcccgtggtggcaacaacgatgcaaagatttcgggtgcgcgaaatgagcgtatcgcaccaggcgtcaagactacaaagaagaccaagcagatcggctgctcaacactgaagggtttgattgagtcgagtcagctcatcatcaacgactacgacactatcgaggaactcaactcgttctctaagaagggaacaagctatgaggctgagaagggcaagtacgatgacattgtgatgagccttgttatcttcgcgtggttctctgcacagccttacttcgaggacacgtttgatcagaacacgagagatcttgttcgtcaaaacatcctgcaggacgctgagtatcacactgccttcggattcatggacgacggcactgacgatggtttcgacttcggctttggcaagcagagtgaggaattgttggagactttccactaacctgagaacataaatatctcagacatattgcttacatgaagcacgatttttgatctcaggagaatatagatggcatcatctaatctaagccctggagttggtttcactgaaactgacctcaccaacattgttggttcttctggcacctcgggcggtgcatttgcgggtgactttgcgtggggaccagtcgagcagattgcgacagtgtcttcgccattggaactcgagaagacctatcacaagccagatgacaagaactacacttcttggttctctgcattcaacttcctcgcttatactggcgacctgaagattgttcgtgcggctgacgaagatgcaatcaactcttcggatgacggcaacggcttccttgtaaagaactcgaaccactttgaagttgtcaagactgctcctacaactgtgcagttcgctgcaaagtatccgggtgcactgggtgactcgatcgctgttcacatggctgacgcttcgacgttcgctggttggcagtatgcgtatctcttcgacactgctccgggctcctcgcagtgggctgaatcccttggtgcagcgaatgacgaacttcacatcgtgatcgttgacaagcagggtaagttctcgggcgtggttggttcggtgcttgagaccttctcgtacctgtcgaaggcttcggattccaaggatgcgaacaacggtcctaacttctacatcaacgtcctgaaccgtacttctaagtatgtctgggcgctggctcttcctactggcgcagatctgtctgctccttcgaccggtaaggttgcttcggtaactgtcggtgcaggtggtactggctacactgcggcaccaaccgtaacattctctctgccaccagcaggcggcgttcgtgctaccggtactgcaactgtgacggctggcgctgtaacaggcgtgactatcaccaatgcaggttccggatacgtcacggctcctactatcacattcgcaggagcgggtacaggtgcaacggcaactgcggttgttggcactgtcactgacgctgcagaatggggtactccaggtgtggttgcaggtgaagcacagaccttcaagcgccttgtcgctgtaaaggctgctcctctgaccggtggtaaggattcgactgctatcactgcaggtgacctgactcgcgcttacgatctgttctcgaaccaggaagaagtcgacgtatcgttgatcttcactggcgatgcaggtggtgagactgagcacaacgttactgtccagagtgcaatcgacaacctcgctgaatcccgacgtgactgcgttgtgttctactcgccgcagctttcggacgttctgaacaagactcagtctgacgcagtgaacgcggttgtatcgactcgtaacctcgttggacgcgcaagctcctacgctgttatggactcgggttggaagctccagtacgacgtctacaacgacaagtaccgttggattcctctgaatgctgacctcgcaggtctctgcgcccaggttgacagcaccaatgatccatgggtcagcccaggtggttatactcgtggtcgccttaagaacgttgtctcgctggcgttcaacccgaacaagaccagccgtgatgcgatctacaaggtcggtatcaacccagttgtcacgttcaacactgacggaactgtcctctacggagacaagaccctgctcggtaagaactcggcatttggacagatcggtacccgtcgcctgttcatctccctggagaaggatatctcgacggctgctaagtactacctcttcgagaccaacaacgacttcacacgaaacaacttcgtgaacatggtgtcgccaaagctcgaacaggtacgcggacgtggcggtatcgaagacttccgcgttgtttgcgatacgtcgaacaacaccgccgaggtcatcatgaaccgtcagttcgttggttcgatcttcatcaagcctgtctactcgatcaattgggttcagctcaacttcgttgcggtccgtcaggacgtcagcttcgacgaagtggtcggtggcacattctaagaacaactactcgtagtattcttgagccccgggaaaccggggcttttcttttgcctaaatagaacgatgacaattggtaacctggcatgacatttgaagatttcctatacgaagcgtttggtgtgaacgaggtcgtgacctatggcacaaacccgacagctgacaatggcgccttctcaagacatgaaggttctattcacacctacatcctgttccgaggcaagaagtttatgatcttgttcctcacacaggacagctcaatcacattctcactggtcagcgataagaaccttgattcgactttgattcctcaaaaggagtctaaggatggtctcgtgttctacaacaagatcttctcagctatgaacgtggtactcaatgccgcacacgctaagaagttccagtttgaaggtgagacagatgagctcaaagacctctatagcaagtttgtgtccaaccgatcattcctcagaatgctcaaggacaaaggctggcgatatgatggagagaagtacgaaggtttgtatcttttctcgaaggtcagcaaataaatacacatgattctcgattagtatggttaggtccatagagattcatcaattcaatctcaataaaggataactatcatggcacaggcagacgtttattcgtttcttgctaacttccgtggtggcggtgctcgccctaaccgttaccgcgtcaacatttccttcccgctgtctgtaggtcgcgcggttgaagcagcaactaagatcagcttcacctgccagtcggcttcgattcctgaatccacactgggtgccattgacgtgccttacatgggtcgtcaggtaaagatcccgggtgataaggtttggggtgattggactgttcagatcctcctcgacaacgacttcctcggacgtaccgttttcgagcagtggcaggatcagctgcttggtttccgaaccaacgttgctcagccacagatgctgaatccgatcttctcgtatgcacaggcagacatcatcactctggaccgtgcagaccaggaagtacagcgttaccgcgtttacggtatcttcccaacaatggttggcgaaatccagctcggctacgaccagaacgaccagatcgctctgcagccagtgacgttcgcaatcaacggctgggaatctacagctacccgtttctaagctatgaaacgaaggacagcccagtgaaatatctgggcttttctttggattaaatatcatgtgaaaccatgaaggaactatcatgcagatttttggttacgaattcgggaagaagaaagaacctacacaagagttgaccacgttcaatatcgaccgtgagactacctctgaggtcgtcgttcctgagacctattacaatgaccatgcgggcgtcatgtctgtcccgtatgagttgctccagactccggcggatgaagccgagcttatccgttcttaccgagaccttgcatctaccgctgaggtcgatgaagccttgcaggaaatccgaaacgaagttttcatcttcgacgttcctggtaagaaggctgttgaactagattttgttaccgagtctaagctatcagctgcgatgcgcaagaagattgctgcagagtttgatgaggtttacaagctcactgactttgatatcaacggcgcacagtggttcgacgattggtatgtagactccaagatctacctctacaagatggtagattacaccaagctcaaacagggtatccagaaggtccagttcattgacccactcaagattcgtcttgtccgtgtcatgcccaagcctaatcctgatggaaccttcgatgccgctaaggtcaagcagttctatctgtatagcaactttgatcctaagtctcatccgctcaatcaggttattcagctccagcagggtacatcaatccaaggcattcaaattcgtccagagagcatcacctatgtgaactctggtctgtttgatcgcaaccttggtcgctttgtcggttatctgaagaagtcgattgtaccattcaacatgctgaagatgatggaagatgcaatgatcatcttccgtgtcgttcgtgcacctgcacgtcgcgccttctatgttgacgtgtctggtctgcagaagaacaaggctgaggcttacatcaaagacctcatggccaagttcaagaacaagatggtctatgactcgaagacagggcagctgtctgatcgtcgtaacatcatgaccatgttggaagactactggctgcctcgtcgtgaaggcaagtccactgaggttacgaccattgaaggtcagaactctcaggacatcatggatgaaatcgaatacctacgcgacaagttctggcgttcgctaggcgtacctcgcagccgcttcggtgaccagcagactccaaacctgtttggtaagggtaacgagatcactcgtgacgaatatcgcttcacaaagttcctgcacactctgcgctcgcgattcattcctgttctggaagacatcctacgcactaacctgttgctcaagaagatcattactgaggcagactggaacgatatcaagcgcgatatcatctggaactacactgaggacaacaccttcgttgaatcgaaggaaacggaaatcctcaacaaccgtctcaatactttaaatacaatcgatcctcatgtaggcaagtatttctccaagctgtatgttcagaagaacgttcttcgcatgtccgagaaggagatcgcagaagaagataagcagcttgcaaaggaacacgcatcaggcatccacgatgacccagatgcagaagacggcgacaatggcgcgactttcagcggtaacgctccgcctcaaggtcaggatgacggagaggaacaagagtttgcagacatccagccgggcgaaaacccatttccaacagattaaaggagccgattaatggcaattgatatcaacaaattgaacgcctacgacttcatcaaggaaatgaaaagccatatggctaacgtccttgaggagcgtctagagagtggtgaggtttgccctccgctgcctctggaagagcacgtagctaaggatacaaccgacaccgattggactgcaatgggtgaggctgaaaagaacctagtcatcacgctccgtgagaacggtcgccagcgcggttcagacgaaggtgcttatgcatctggtgtcctttggctgacattcaagaacaagaaggcttgcgaagactactgcacctacctcgaaactgccgatggcgttgacacctatgagattgaagctgtacgcgaagatctcgtgaacggttttgtcgaagatcaggaatatgacttcggtgacattatgttcgacaaggactttgaattcaacgtctatgtctacattgatgcagacctagttatgcttccggctgaagatctcgaagttggcgacgagtttgaatgggatgacgattcagacaacggtttcctgtccgaggttcgccgaaagatcaaggtaaacttccgcggtaagaagcgcatcaagatgcagtgcagccctggattcaagtgggatgcggcagctaagacctgtaagaagatctctggtgctcaggtagctgttatgcgaaaggcaatgcgccgcgcagtattgaccaagaagtcgatgggccagtcgttcaaggcacgagtcgttcgcaagacccgcaaggctaaccgcttccgtaaatcatttggactgggacgctgagatgacgtttgacgaatacctagcagagcaaaacttggctgcgatggctaatcatcacttcactaaggctaagcgccacaaagaaggcacgctgcattggcataagcacaatgcgcgtggccacgcactttgctcacaacatcacgataagaacggcgaccacaaaaaggctgccgagcatcacgccaagtgcgaagagcacattgccgctgccgaaaagatcgaagatcagaagcacggctattaagtagaagagagaacaggaaatgcaagtactagtagaacgcattgacgatgttcgtaatgaaatcctcgttgaggaagttggtggcatcaagcacaagaagtacatcatcgaaggtatcagcatccaggctgaggtaaagaaccgtaatggtcgcgtttacccaaaggaactgatcaagcctgagatcgatcgcttcattcgtgaagacattgcacttggacgtgcggtgggtcacctcaatcaccctgcaaacgatccgcgtaacgactataaggaagtgtctcacaagtatgagtcgctgactgaggacggcaacaactggatcggtcgcgcagtcgtaaccacaggcacaccaaatggtcgtatcgttgctggtctgatggatgaaggcgtgaacatgggtacgtcaactcgtgctcttggtaagaccaagatgttcgagcagcgcggtcagaagacagctgtggtgcagagctttaggctcatctccccaggtgacattgtatctgatccgtcggcaccagatgcatacctcaccaacctgatggaaggtaaggagtgggtttgggaaaatggtctcctgatggaacgtgaagtggagattaagaaggagatcaatcatgcagctcgcacaggtacactgaacgaagcgaagatgattgaactgttcaagaagttggttgctctgagcaacggacgcgaagtctgagaatttctcagaactaaataccatagaacttaaaacatcattctgaaagatcttaggagtaagtaatgaatgaacaactaaaggaacttctggagaccctagagctttcagaagaaaccgcaactcagatccagaccatcctgacagaagcattcgcagctgcaaaggaagaaggtaaggctgagggcaagaaggaagctgatgaagctgctgacaaggacaaagaagcccttgaagaagcacatcaggaagaaattgcgttcctcaaggaacaggctaatgcctacggaacccacctgaaggaaaaggctaacgcttatggcgagtcgatccaggagtccgttgttgctaaggctaaggagtatgctgagttcgcagttgatgcattcatcactgagaacaaggaacgcttcgtagaaactgaagagttcgctcgcatgaaatctgcgttcgagttcatcaaggaagcatttgagaagaatgcgttccaagttaaggaagatgctgctgtaattgagctgacagagtccctacaggaatctactgctcagtatgagtcgctcttcgaagacctctctgctgctaaggaagagcttgcacagcttaaccgcactctgattctggagcgcgcaactgctgatctggctgagactcagaaggagaaggtaaatgaattgcttgaggctgtctcgttcgattctttggatgagtacaaggacggcgtagcaatgatcgttgagcaggctaaggctgtggctgccccagcacaggttgcacctctcgccgacaccccggaagtgctcaacgagcaagcgaccccggctaagaaggaagtcaaccaggatgtcaagcgcctgatgggcaagggccttctgtaagttgaattcccagaacataaatatctgagaattgtttaattcgtatttgagatttttaggagaacaaaagatgtctcaagaagaaaataaagtggataccctcctagagaagtgggaaccagttcttgaaagcgaaaaggcagatgcaattactgacccgtatcgcaagaaggtaactgctcagcttctggagaacacacaggaagcactgaacgaagcttcgaacctgaccgccggcgtgcagaactgggaccctgtcctgatctccatggtccgccgtatggctcctaagctgatcgcttatgacatcctcggtgtgcagccaatgaccgctccgtcgggtctgatctttgcactgaaggcacgtcgtgctgctaccccaccgaacactggtcctcaggctggtgcagaaatccttggtctgcaggaagctgatacttcgtactccggtaccggtactcacgctgcaatcactgatgcaaacttcctgactggtttcgcgaccggtactggtaaggtcacatcggctggtgaagtggatccatggaactcggtcggcgtcaccatcgacaaggtcaacatctcggcagttacccgtcagctgcgtgcagactactccattgagcttgctcaggacatgaagcgcgtacacggtctggatgcagatgctgagcttgttcagatcctcagcaacgaactgatctccgaaatcaaccgtcaggttgttcgtacggtctacaacgctgctaaggtcggtgcgcagtttgcttcgtccccaggtaccttcgacctgaatgctgacgctgacggacgttggtctgttgagcgcttcaagggtctgctgttcgcaatcgagcgcgacgctaacgcgatcgcaatcgaatcccgtcgtggtaagggtaacttcctgatcgtctcctccgacgttgcttcggcactcgcgatggcaggtgttctggattacgctccagcccttcagggtcaggtttcgctcgaagtcgacgcaaccggtgcaacttatgccggtaccgcaggtcgcttcaaggtctacatcgatccgtacctcggtaccgatgcatacctggtcggcttcaagggttcgactcagtacgacgcaggtctgtactacgcgccatacattcctctggaactgcaccgcgctaccgacccaagcaacttccacgctgctctgggcttcaagacccgttatgcaatggcagagaacccattcgtgggcaactcgaccagcatcggttcgaacgctaactattactataggaaagctctggtcaagaacctcatgtaatagtgaggctcttgctgggcatcccagtaacaagtttgaaacaagacccgctcaggcgggttttgttttggttgaatatctatgttttctatagtctataggcgaaaggcattactataggactatggcatacacttacctaatcggctggaccgatctaaacaaatactattacggcatgagaagtgcgaacgtggtcatcccagaatacgacctctggcatgtctacaagacttcctctatctatgttcacgaatttgtagcacaatttggtgaccctgatgtgattcgagttcacaaggaattcgagactaaggatgaggcttacctctttgaaacaaagttcctaagacgagtgaaggctcatatcaacgacaaatggctcaatcaaaacatctcaggtagacctcagggcggttcacctgcacaactcgccgcagttaaaggacgcaagcagagcgaagagacaaagataaagcgtggcatctacaacaagaagtctgaggaacataaaaagaagattagcgattcaacctcaggtgaaaagaatcctatgtacggtaaggttggagtgaacaaccctcaatacggtcgcaagcgcactcctgagcaagtagagagaatccgtcaatcacagttagccgcagctgcaaaacgtcgtgagctgggaattgtcatcaagcataagcctcgcaccgaggagcaaaagaagcgcatgtctgaggcagctaaagctcgttgtgctcgtaaaaagttgacgaacaatgatcgtacatctctatgatgcatctttctggactgttaaaatgctcttgaaccagatgggtagcaaatagaaagaaagttagaaagaaaataaagaaaggagtatagatgccaccgaggtgtcgtgcccgaggctaaaagattcggcatgtagtacatagacacacgtggtaggtgtagcttttaagcaagaaagtgagatcccttgatactactaggtttcagtagatgaaggggtaattttgaaaagccgtagaacccttgatattactaggagttgcgtatgcagttttattcttcaatgaccttggcagactttgtagcagccaattggacactgatggaccctaatgtggttagcctcattgaacgagaagcagatcgtcttgctgagttggaagaagatttgatctcgtggaaggcaattgctgatgacattgtagatgccaatgaagacaatcgtgattacattctcaatcgaattgaagacatcaagaaaggttcctacacgctagatgagcttgaagagttcgttcgtcacatggatacctcagtatgatcagactcattggactaacaggtaaggcaggaacaggcaaggacacctttgcaggtttcatcaacaaggccatcaattttgaaccgtattcgtttgcaggtccattgaaggatgcttgctgcggattgttcggatggactcgtcatcagattgatcatgacagagagttcaaagaggcaattgatcctcgttggggtttcagtcctcgccgtgcaatgcagttgatgggaacagagtatggacggcagatgcttcgcgatgatatctggattcacatggcaaagatcaggcttgatgaaactcgcaaggcaggtctgctcgttgtggacgttcgctttgagaacgaagcatcatggatcagagacaatggtgggttgctcatccacattgaacgtccgggagcaaagtctgtggctgcacacgcttctgaggcaggtgttgcctttgaggatggagacctggttgtcaccaactccggatcattggatgctctccagatcattgcacagaacatcgtagccaacctgagattgaccgattaaatactggcatgaccagtaaaacaatcaatcgaaatccagcgatcaacaccagctataagctcgagattccgggctttgattcgctgaactactttgtgcagtcaaccgaaatcccgtctctatcttcgggtggtgttgaaaccgcatatcaaaactggggtacgaacgtccccagtaacagaatcgagtttgatcctctgaacgtcaacttcttggtgtcagaggatctaatgaactaccaatcgctctatgagtggatgattcagatcaccatgactgagcctgtagttcctgagatgatgaagaacattgttctgcacatcaccaactcgtctcgtaatcacaagatgcagattcgattccataaggcatatccgaccatgttgggttctatcccatttgattcgggtgtcaatgatgtgaatcctctgctctgttccgcaacattccgttatcaatactttgagattattcgcgatgcgtctggacgaacttcaagctgagattgccgttgactctgcaatcaataataatgccctggatacggaatccctgaggattccgatgctgcactcgaagtactacaactacttccttacagagcttcgtattctgaaaggcatcgagattgaatataagcgtgtgaagaaagaacgccaccagtattggctgggacaggcgagtgatgaagtctacaaggctgagcctaaagacatcaaaatcctcaggcaagaccttgaactgtacctcgatgcagatgagaagttgactgagctgaaatcgaaatatgagatgcaaaagatgaagactgagatgctcgaagccttcatcaagacattgaacacaagaaacttcctaatcaagaactcaattgaattcctccggttcaagaacggcggatgacataggcacgaagaatgcaagcagatatcaaacttcactataagaacgaactacacgtcaccctagactgccctgttggcgtctcctatgaagtgtctgaggcgtttgcattcttcgtcaatggttacaagttcatgcctgcgttcaaggcaggtcgttgggatggtaaggttcgcctttacaacatcaaggaccgcaacttctacattggtctgctgccaaagctctttgaatgggctgaggaaaacggctacaccattgaatacgcgaacccgaaagacttcgagcgccagtacccaaccatcaatgaagaatcctggaacgagctcaagaagtgcggcaagtttgagcctaagtggtatcagaaggaagctgtcttcagggcaatcaatgagtctaagactctgatcctgtcgccaacaggctcgggtaaatcttacattcagtatctgattacacgttacctgcttgatcacactgatggtaaggtcctgatgacggttccatcgacgtcgcttgttgaacagatgttctctgacttcaaggactatgtagctgacgattgggacgttgaagggaacgttcaccgtatctactctggtaaggagaagtacacagaacaccgagtcgtcatctcgacctggcagtctgcgatcaagctacctaaggcatggttccagtctttctctgcctacatttgcgacgaggcgcatggtgccgacgcgaagagcatttctcagatcattgaccagcttggtcatgctcagttccgccttggtctgacaggtacactcgatggaaccaagatgcacgagcttgacatgcaggctcgattcggttccattgtgcgcgttgcctcgacaaaggacctgcaggatgaaggttctctggctccgttgaacattgagtgcttccagctgcgatacagcaaggatgatatcgctctcgtgaagaacatggactacgatggcgagatcaagttcttggtcagtcatccgaagcgcaactatctgctcgcaaagactgcattgacgcagaagggtaacaccttgatgcttttcaactatgttgcgaagcatggtaaggtgctctacgagttgatgaagccaatgtgcgagaagtacggaaagaatctgtacttcatctcaggctcaactgctgttgatgaccgtgaacagattcgtcagattctggagaaggaaaacaacgccatcctactcgcatcgtacggtacgcttgcggttggtgtcaacgtcaagaatctgcacaatctgatcttctgtcacccgatcaaagccgtcatccgaacccttcagtcgattggtcgaatccttcgaacggcagaagggaaacaagatgtaaaactcattgatatcgcagacgatttatcctatactacacgcagtggggtaaaaaagcagaacacaattctgcgccacttcctagaaaggctcaaaatctacgtaggcgagaaatggaagtacaaaatcatcccgatcaagatgggcgagtaagcgaaaactcagctgtagatttggtaaaggtcgaatcgggtaaggcatatccgattcggctaatgcacttcccaaacggtttgaatgtcattggttatgtgattgcagtcttcccagagactacgatggttctgcgaccctatacggtcacagttgattacaatgcacatacagataatgtcgaaggatatgagttcagtcctttcctggatcagatggcatatttcaatcctctggatttgacgccggttcccttcatgaacaatcagatgatcgccattgtgcgcccatcagaacatgtggtgagcaattacactggcgtgatcaggttgagagaaaagattgcatctacccctgacgatgaacactttgagatcctagtatctcgagaggttcctgatagtaagacacttcactaatacggcattttcagcattgaccgaagacaagaagaaagcaaatcactatgtagacaagcaggcgctctacgctgacctgtgtgaatggaagattcggaaagacacggcaatcgctgaaggcaggaaggcaccacccctaccagattcggttggcgatgctatcatgaaggtagctgagggtcaggcatcacgtccaaacttccgtaactatacctatatcgaagagatgaagggcgaaggcatcatcgcagccgttcgcgccatgaactccttcgatccaaagcgcctcggtaagaacggtgaggttaacccgttcggattcatttccctgtgcgtatggcgagcattcctgggctacattgcctacgagaagaagctccaaaagactaagatggatatgatgactgatcctgtcaacgagttcttctcgacgatggatggcgatcacggtcactacatcgacaactacgacgtcgttgaattcatgagccactgaggtaatcatatgaagattgcaatgattaccgatcagcactttggtgttcgcaatggctccaagttcttcttggacaactacgagaagttctacaatgagatcttcttcccgactatcgacgaactaggcatcacacacctttggatgctcggtgacttttgggaataccgcactcgtattgacgtggttactctgtggcgcgctcaagagatcttccttgaccgccttgaggaacgtggcattcaagtaaccatcatctatggtaaccacgacgtcgcctacaagaatcgaaacgacatcaactcgatcgacttcttggcgaagatgtacaagaacatccatgtggtcaagacacacgagacgattgagtttgatgggactcctgtcaacttcctgagctgggtgaacaactccaacctggcagatagtctcgagttcatcaagaactgtccgcctaccatcctgtgtggtcactttgagatcaagtcgtttgaaatgatcaagggtcacgtatgtgaacacggcttcgacaagagcctatttgatcgctttgatcaggtctattcaggccacttccacacggtctctaccgacggtcgaatcttctacatctcaaatccatctcagaccaattggtccgactacggtctagacaaaggtttccgaatctttgacacgaccactcgagagttggaatttgttccaaatccgtttgatgtctactccaagatcgcctataatgacgacattgatatcgtagagtttgactacgatggatatgccgataagatcgttcgtgtctatgtgcagtcttactcttcgacaaaccagcacaagttgagtctgttcctcgagaagttgaacaaggttgtctatagcgcagacctgatcgagatcgacgagactcaattcaatagcgagactggtgacctgcaattcgtagacaaccatgagctgattgagaaatacatcgaagaggttgtccagagcccaaccattgacaagaacgtcctcaaaggcatgttcaaggaaatgtaccgtgaggcactggatatggcagagacagaatgacaacttatgtagatgaaatgagaacagagcttcttgggtatgccgctcttgatcctgaaatccttgcattcatgcgcaagcatttgcctaggatcatcgctgaagaacttgtaggtgtccaaccaatggatgaaggtggcaaggcctttgaggagctctatcagcatcttaaagcgactaacaaagcctttgtcttttcgagcaattttgaatgatctattttcgtaaactgagattcaagaatatcttgtccttcggcgacgttatgaccgaagtacagctggatcgctcaccatcaacaatggtcatcggaaagaatggtgtcggtaagagttcgctcttgctggacaccctcgcctttggtctgtttggtaagcctttccgcaagatcaagaaagagcatctgatcaacactaagaatggtagagatgctctggttgagattgagtttgacaaggatggcaagagctaccttgttcgccgaggcatcaagcctggcatttttgagatcttcgaggacggtaagctcctgaatcaggaagccaacaaccgcgactatcagaagatcttcgagcagcaaatcctctgtatgaactacgacgctgcctgtcagatcattctggtcggtaaggctcagcacacgatgttcatgcagctcaacactggcgaacgtcgcaagtttgttgaggttgtgctgaacctgatcgtgttctcaaacatggcacgtctgcacaatgcaaagacgaccgagcttcgtaaccgcatcggtgaactcaagactgcaatcactgtcgcagcagagaagatcaagatccgtaagaagtatattgatgacctcaagaacgctgataagcaaaatgcagcagcagaacttgaacgtatcaatgctcagattgacgatatcactgctcagttgaccgagctacatgcgcgtaagagcgagattgaaacggtcgaaggtattgacagggatgcctataagaaggcgatgaatcatctgtctgagcactccaagatgatcgtcaagctggacacttctctgtctcagattgagaacagtctgcgccagttgaacaagtctcaggattgccctacctgtcatcgtcctctagaacatgaggatcatgctaagcaagtcgatcaccttacagataagaaagccaagatcgatctggcaaagatggagctgtctgttcgcattcagcaatttgagtcggtcgtggctgaattcgaggttgcggttgctaagtacgacgcttacatcgacaaggttcgctcggttgacatgcagattgcatcggctgaatccaagcgagacttcctggtcgctgagacaaagaaggaacgtcacagtcaggcagacaagatcaaggaagcaaacggcgagttgaaaaagctcgaggacatgcacaccgctctggtagacaagctggaacagctttatactaagagtgattacatgagcctgattggaacgatgctgcaggacaagggcatcaagacaatgctgatcaagcgcttcattccgatcatcaaccacgaggtcaacactcacctcaatcacctcggtctgttcgtcaacttccatctggatgaaaactttgacgaaacgatcaaggcacgaggctttgacaccctcgggtacaattcgttctcagaaggtgagaagctgcgcatggatatggcgcttctgatggcatggcgtgatatcgcacgaatgcagggcaacgttgcaacaaacatccttatctttgacgagatctttgacagctcacttgaccaaggcggcgctgacgcattggcagacatgcttgcactggtgaaggacttgaacgtcttcatcgtcacgcacactccagagaagatcattgacaaagtccgttcaaccatgaagatcgagaaagtcgacgggtttagtagaatcgtatgagcacattctttcaacagttcttcgaggacacctgtaaaaacgtccttagcaatcatctcggcgagttgtcggatgaggtaacatatcaagagatccgtattgatctagccgaatatgctagactaacgggagtccaaattgttatgaaggtcgttggaccaaggcacctgaacttctctacatggagtcaggacgttcagtatttctatgactaccaatggtaaaagatcatgagtaagcgtttgacccagtacttctatctgtacgagctcggtgagaacaccatcaccgagcgcatcacattctttgagggcgaacgccccgaggctcttgccattcccggttggaagggttggttggacgagttggtccatgcaggtgaagctgcattttgatacatgactgaggttacatgttgcctcagtcacctacctgttagtataagcacatattgttcacttaggagttgtaaattatgagtttgtcatctgaaactttgaatgttctgaagaactttgcctcgatcaaccagggtctcctgttcaagccaggcaatcgtcttcgtactctgtccgttctgaagaacgtgttcgctgtcgctgaaatcaacgacgagattactcgcgagttcgctatctacgacctcaacgagttcctgggcacgatcagcctgttctccaagccgcacctgaccttcaatgaagatcacatcctgattcaggacggcaagaccaaggtcaagtacttctatagctcgccggcagttgttgtgtcgccgccggacaaggatatcgtgctgaccgatccgctgctgaccttcgaactgaccgaaggcaacatcaaccagattcagaaggctgcggctactctgaaactgaaggaactgtcgatccgcgaaggcaagctgaccgcactcaactcgggtggcgttggcaatcagatcaccattgagctggataccgaaggcaagatgagtgacgagaagctcgtcaagatcgagaacctgaagctcatcgaaggttcgtacaatgtcaaggtcttcgagcaggcagttgagttcagccacatgaccaagccgggtctcgtctacctggtcaccgtcgaggccaagtaagatgacggccatcttcgggaacattctcgatcaggcgctggagctaaacctccagcgccaggccatcaatgctaactaccgtcacaacttcgagcctcacatgtggatgcgcgagttctgtacggttcgcctgcagatcggtcgtggttgtggtcacacaatggcaatccgatctcgttctaagcgagatgatttggtgattgttccgtcgtcattccacatcatgacgatgtctgagaatcgagttgagacgcctaccgtcatttcctcgactgatccgaatgccattgtccttcgcgggaagactttcaagcgaatctgggttgatgatgcttcgattcgttctgatggtgatattcggaatgtgtatgtgattgcattgatgcatcgtgccgaacaaattatccttgtaggctgatttaacaactgtgagatattgataatgagtgacgagaaagaaatgtacctgtggagtgagaactatcgtccgcacactgtgaatgactgtattcttcctccacgtttgaagacctacttccaggcaattgtggataagggacaactggccaatatgacattggttggtggaccgggtacaggtaagaccaccgtcgcacgtgcgatgtgtgaagagctgaaaatcgatcatatcgtcatcaacgcgtctgagaacggcaacattgagacgattcgtactacggtacgacagtttgcatcgacggtcagcttcggtggtggcatcaaggccatcatcctggacgaggcggacggtctgaccaagaatgctcagcaagctctgcgcgcctcgattgaagagtttgcaggcaactgccgcttcatctttaccggcaacttcggaaaccagatcatcgaacctctgaccagtcgagcaccgatcgttgagatcgtcttctcgaaggaagagaagaaggctctgctgatggagttcttgaagaaggttgcaggtgtccttaagtcgaagggtatcgcattcactcctgaagaactgactcaggttatcgtcaagaacttccctgacttccgtaagacttggaacctgatccagcgttattcggctaacggttcactcgagattacgagtcagacaggtatcaatgatggtgctctgaaagaactgattgattacctaaagggtaagaagtttggcgacatgcgcaagtgggtcgttgatcacctcgacaatgatgcagcatctctgcgtcgcagcctgtatgaaaagatggctgtctttgtcaagcctcagagcattcctcagctggttctgatcatcgcagagtacgactataaggaaggtcacgtcatggacaaggaaatcaacaccgttgcgatgttgactaccatgatggcggacgttgaattcgtataaatatctaggaggtaacaatggcatctatgagtccatttgatatcgcctcgcacatcaacgagaagaaaggtgtgctggatgttgaagaaattggctatagttcgtacgtagtcaacaaggtactgtcgaatacaattgatagtgtcttgttcgcgaatgagatgaatcgttactggggacttccaacccaggcgcaatttgacttctattaccatggtctgccgaagaagaagcgcttcggcaagtggcacaagaatcaggacgacaccgcgtcgctcgatctaattcaggaatactacggatatagtcggaaacgagccaaagatgtgctcggacttcttcgaccttatcttgatgacattcgcaaagaattagaaaaaggtggcaaaaatgtcgcaaaacagaaagcaggaacttcttgagtccttctttgaaattgagcctctaaacaaggaccagtttctaaaggtacgtgaaactttgacccgtattgggttgccaagcaagcgaaatggtgatcagactctttggcagacatgccacgtcttccataagcaaggtcgttactacatcgtccatttcaagcagctgttcctgctcgatggtcgaacagatgtaaccgactttaccgatgaagatgaagatcgtctggagttcatcgtaaacttgcttgagcagtggggtttggtcacatcactggttgaagttgacgccagagttgaatcaaacgtaatgattatcccttatcgcgataagcataagtggagccttcgtgtgaaatactccttgggaaatactgataatggcgagagctaagaaagaagagcaggtcactgacctgggcgcgctggatatgtccagcgtagctgtcatcggacagattgcatcgttcgaagatgacaacgttggcttctatcagaagcgcaacaagaccattcctgattatgcgacagagttctcggcaggctttgacctgagcgttgacattgaagcaggtgacgtgatcaacaagtacgatcatcgtaatcagaagatcgaaatcactgctcgtggacaagacaacgctccggcgcgtctgtacctggagccaggtgatcgtgctctggttccgactggcttgcacgcggatatcccggaaggctactacatcgcgattcatgcgcgtagcggaacttcctggaagcagggtcttattctgacaaatggcgtcgcagtgattgacgcagactacgtgggcgagatcttcatctcggtcaccaataacagtggcaccagggtagtcctagaagacggtgagcgcattgctcaggggctgctgatgcccgttatcaaggcacccttcaagaggcttgacactaagccagcacaaaaaactagccgcgcaggtggctttggatcaacagggagcaagtaatgagcgatatcaagttggtatggaccactcacggtcagatcctcggtgaagtcaccgccaagggcgatggttacgaagtagagaatccggtattcatttcgccgggtgggcagggtgtcagcatgctgcctgtgaacatgttctccgatgaaacgaagatcactctgacgaaagaggaccttcgcttcggtggtcacctgttcgagccgatcactgagctgcgcaacgcgtatactcagcagttcggatcagggattcagcttctgagctgagtcggctgaaacgccatatctcgccgagatcagcttgctaacacttgctgatccggcgatgacgcctagataggcaagccagataaactcaagtgatgctgccgctggcgcagtgatattgatgaataggaacgcgatggtcgccacaaaacaggcaacgacgttccagaattttgtagatgacacggtcagggtgcccggctcgtagaacatagagctgaggtcaagtttcctgattgccttgaacaagacataagcaatcattagcatgaagactagtgctgcacatgaggcagcaaacaggaagccgttggttccaatggctagccatgctagaaatgaggagagtaaagacataatggcgttctataccttttgcgattcgattggaagtaagatttaccacaggtatgtggacgatgccggaaaacgccatcaagaaattgttacaagttttcctatcgagctatttatcaaaggcaatggagaatacaagtcgctctatggtgaccgtctcagccgaatgacctttgatacgatttcggatgccaaagacttcatcaagaagtacgaaggtactgtgcctgtctttggacagacttcgatgcatcaccagttcatctctcatcgttaccctgagaagattgaattgcagtttgacaagtatcgcgttctaaacttcgatatcgaaacccgattcgacggtaaggacgatgaagatgaggtgttggttcgtaaggtgttcagtcttgaagaagagaccgtcaccgttggttacatgaagactctccaggacgtttgggaagtctatgatccgatcaacgagcgttggtatcctgcatctaaggcacctcagcgcaatccaggtggcttccctgacgcacagaatgcagcatacgagatcacttcgatctcctgcaaggtgtttggtcgtcctcagaaggtgaccttcggtacgaaggaatatgaggtcaaggataagaatcagatctacaatctgtgtgcagacgagcgtgagcttctgcagcggttcattgactttgttcgtttggtcgacccagatgcaatcactggttggaacattgagtcgttcgacgttccctacatcgtgaatcgctgtcgtgctctgttgggtgagaagctgacgaacaagctgagcccgttccatgctcacactgatcgttgcattcaggactattggattgatgacgacaagactgaaaagggatatcgcatcttcggcgtgaccactcttgattacatggacatgtataagggttacaaccctgtcaagcgagacagttacgcactggacttcatctctgaggttgagctgaaagagaagaagctggactattctgagtacggtgacctgatggggctgtatcgtcagaactacgaaaagttcattgactacaacgaacgagacgtttacctcgttgagcgacttgatcagaagaagcagtttgttcgacttgtgatcaccaccgttctgatgaccaagagtcgatatcaggaaaaggacggtaaggtaaagctgtgggacaatctgatctacaatctgctcaaggcagagaacatcgtcattccgccagcagttcagaagcacggtcgtagcatcattggcgcatatgtcaaggagcctgtgcctggcaagtaccgttgggtatcttcgctcgacttgacctcgctgtatccttcgatctgtatgatgttcaacatgagccctgaaactctggttcgtgaagagcaaggtcagctggattgggttgagcgtctgttgaagggcgaagacctggctgcggattgccgagctcagggttgggcgatggctgcaaacggctcggcgtatcgacaggatgtgatgggcgtcatgccgaagggtatgaagttcgtattcgatactcgtaaggctgagaagaatcgaatgctcgaccttaagcgcgagaaggaagcatatcttgcggctggtggcacggaaggctcggaagagtatctgcgtctcgataacctgattgcagcggcagacgcaactcagggtgcgatgaaggttctggctaactcgggttacggtgcatcggcgaacaagggcttccgttacttcaacgtgagcatcgcggaaggcatcacattgaccggtcagctgggcatccagtacatcggcaacatgatgaacaagtacctcaacaagaagtttggtacggagaaggattatgtgatcacgtccgacaccgactcggcttacatccagttggagaacctgccctcggatccgaagaacattccgaagtcggttgacgagattgatgacttcctcgagaaggaattcacaccgttcatcaatgcagcatatcagaagctgtctgatcgacttggcgcaaagaagaacctgcttgatatgaagcgagaagcaatcgcagacgttggcatcttccgaggcaagaagaactatgttctgcgcgtatgggataacgaacacgttcgttacaatgagccagttctgaagatgaccggtatcgagactgctcgaagcgacaagccgatgatggttcgtaagaagctcgagagtgacctagagatcctcctgacaggaactcaggaacagttgcttacttccattgatagtttcaagaaggagttttataatgctcctattgagaacattgcttcgccgaagggtgtaaaggatctgacgaagtggattggtgacagcggtgaacttttgccgaaggctccatatcacgttcgtgcagcatacgctcacaacaccttgatcattgagaagggtctgcaaaagactgtcgagagaatcaagaacggcaacaaggtgaggctgatggcgctcaaggcaatcaatccttgccgatgcagcaacatcgcattcaatggcactctgcctgaaggtttcgatcttcacgagtacctcgacaaggacaagcaatggaatgctacgtacatcactcctttgaagtccttcactgaaatcctcggatggaagactgaaaaggtcagctctcttgaaagcctattcggctgaggggtttaagtatgagtgcagctagcgagatgttgaaactgttggccagtttgcagaacgaactggtcatggttgacattgacccggaaatggctgagtttgcggaacacgaaaagatccttgatgttttccgacagactgtagcatcaattgaacacatctatcccatggtacaggcggtcgaagaagtcctcgactggtctataactccagctctcttctatcacaaatggaagagagcggctgctcacatgggtgtcgatgacgacattggtgaagaagatatcggtccagacgttcgaggactactcgatcggtttagcgacgataatgacgatgaagaagacgaaggagaagaaagttgagtttggttgataaattgatgaagcagtctacgattaaagagactgcatcgctggagaatagcaccttcttccagaaaaaagaactggtgcagacaaagattcccgtcctcaaccttcttcagtcgggtgagcttgatggtggtttcggtcctggtctgaccatctgggcaggtccatccaagcacttcaagaccagctttgtgctgacgaacatgaaggcgttccttgacaagtacaaggatggtgtggttctgttctacgattcggagttcggtactcctcagagttacttctcgtccttcggtattccgctggatcgcgttgttcatactccgattaccaacatcgaggtgctcaagttcgacctgatgcagcagttggatggtctgaaccgtggcgataaggtgttcatcgcaattgactcggttggtaacctggcttccaagaaggaagtagaagacgccctggaaggcaagtcggttgcagacatgacacgcgcaaaggcgttcaagtctctgttccgtatggtcactccggtgctgtcccttaagggtctctgtatgcacgtcgtggctcacacctacgatacgatggagatgtatgcgaagaaggtcgtgtccggtggtacaggtcttatctactcggcagacaacatctatatcgttggtcgtcagcagaacaaggatggtcaggaagtcgttggttacaacttcgttctgaacgttgagaagtctcgctatgtccgagagaagagcaagattccggtcgaggtaacattcgagaacggtatttcgccttggtctggtctgctcgaccttgcacttgaaaccggtcacgttgtgaagccttccaacggctggtatcagcaggctggcactgaaaagaagctccgccttgcagatacgaacaatgctgcattctgggttccgatccttaccaagacagactttggtgcaaagctcaaggaacacttccagcttgctcagactgaaatgatcaaggctggaacgatcgattacgaaactggcgaagtgattgaagaataatggttaagaaggttctaccaacaacgacgaattggctctatgctaaggagcctatgctcggagcgccaaccattgcgaacatcacgcaatggttgcgtaagaacaagctgacggttgtccaaaaaggtcgtcgtttgacagtgaaccatcgagccaacgtagagcctgtccgcctcgctgacgaaattcagttgaggctggaaggctcgcgccgaatctcaaaccttgctgtgaacgtcaatggtattgctatcgtcgtatcggctagcctgaaaggtaacgctggtgaggacaatgaagaatacttgatgcaccgtgtcaatcgactcgtcggttggctcggtggacctgttgacgtgaccttcaaatcaaagaagaaagcgtttgagatcaaaggtgttgttgaagtctatctgtcaggacgcgatacgtctggacataagaaagccgacgttgagttttggactaagagcgggaagatgattcctgtatcattgaagcaaggcaacgcttcattcttctcttcggctgactcggagctcaaggaaattgctgaggcttcggtgcgatacgcatttgagaacgccttgaccaattttgaaatggatcctgcaacaaagatcaggaagatcaaccctgaccttgtgattgaacctacagataaggaaaaggaatttgcccttttcggaaatgacatcttgaaaggtaaaggtgctatcattagacagtcattcaccatgaatgatttcttccaagatgtgcccaacaagctgttcattcacgtcgaagacatctggcaagaacttcgtgatgtgccagagattgaacagcctgtaattcagatcagaaacgacaaagatagaaaccgaagccacccactgctcaaaggtctacgtgcgctgacaatcaaacgtgctgtagttcctaagaatgctagatggatcgaccgtgagaaactaaaataatggaactctacgtaaaagaagcccgcgaagactaccttgaagtcatcgacttgaaacacccgcagtaccttttcatcttcgatggcattcatgttgggaccaacaatggcaagctagaggtccttgtaaataaagcgtcggtacagaaatccgacaaagcggaagagtctaaccccgatgcaattgtcgcggatgaagatgaattccttagtacacataccgaactaatcatcaacgaactgttccgtggtccagttgaaacggcacttggttgatattatcatataggaaatcgtaaaggaaagtaacatgcagaaagaaaaaaccaatccagaactcggtcagcgcgttcacaagcacctcgtcagcctcggcattgaaacgccaatcactgagctggtgaatgtcccgagcaaagagaagatcgcgaagatcgaagagttccagcgccagtcgttgctcactctgggtcttgatctgaccgacgactctctgatcgaaactccgaagcgcatcgcaaagatgtacgttgaggaactgttctacggtctggattacaacaacttcccgaagtgcacagaagttgataacaagattgaatacgatgagatggtgattgagcgttgctcggtcaagtctgtctgtgaacatcacctcgtctactttggtactgctcaccgtcccgatctgtcttgctgggtgtcttacatgccaggtgagaaggttctgggtctgtcgaagctgtctcgcatcgtagacttcttcagccgtcgtccacagattcaggaacgcctgactgtgcagattgctgagaccatcaagttcatcactggcacggaagacgttgctgttgtgatgaagggtcagcacttctgcgtactgactcgtggtgttgaggattccgatggcgtgaccatcacctctagcctgagtggttcgttccgtaccgatcctacgctgcgatcggaaatgatgtctttgatcaagggttgatatgagcgagcacctgaaagaacttgaaagagtagccattgaaaggctggttgagtacggtgatcctaagggtgtgtatgttgcgacgagcggcggaaaggattccgtcgtcgtccatcatctagctcgaaaggtgttcggtgatcaggttcatttgattcacacacctaaggtgaccggtttcaacaaggtacatcctgcgactgtagcattcctctatgagcagagtgcgaaatatggtctcaacatcgttccatttgaacgtatgcaggagtatctggataccaacaagctttggatccaaattgacggcactcgccgttccgagtttgatcggaccgatcgcagtgcagacgtcgtagtgaatggtaagttgatcagccgagcggacatgcctgttcatacggttggcggcttgtttggcaatgaatcaattttccctattgtggattggagtgatgatgatgtatgggcatatattggacagcaaggtattgaagtcaccgaggaatatcgtattctcgccacacgttgatgatgaagtgatcgggtgctttgaagcacttgatcgcggtctgatcacagacgttgtctacttctacgatatcaccgaagagagaaagatcgaagctctgaaaactgctgagatgtttggctttacgccgcattttgtaagctctgattggtttgggcttccgaaagagattgataacatcgcatctgatgatacgatcttctgtccgaccattcgagactcacattctcagcacgctgagattagcatcagagcccgaatcatgcgcagaaacactggctgcaagttggtgttctatacggtagacatggattcgttccaggtaccgcttcctcctaaggttcgagcaaagaagaagtctgtccttcaggaactgttcccttcgcagagtgttttgctgacgaatgagaaatatcatctgttcgaaggctatagcgagactgatcactatcagggaatcgagttcagaattgacgatgaacgaaaggttgtgatgaagggttatcacgtcccttcgggccttgaagcgccttgggatgattcaatttcagattctgaatacctcaacatcctgatcactcgatatttcaaccgtaattcggttagttacatcgcatttcacaatggcaataggtgggtagaatttaatggctaagattggtattgaagtagaaggcatgctgcgaggcgagaacgttcgcacttatttctgttcggctcgagagtacgttgaggcagatcttctcaatctcatctacaatctgtatgcgaatagtattgagatgatctacatttcggatcattacaacgagcttgatctgcatcaccttgcagaagtgttcaatgatagtggcatcggtgtcactgttgaactgaccgagttgaattcggttccgccagaaggtgttgagatcttctggaatgtttcgcaggcttcttatgctcagtctcgtactttgcatttcctgcgcccaaaggatcagatcaagatcgagaatgagaaacacgttcttgcattcgttgcaggcaatgcggtaatcacttatcctgaggactttaatggagacattgaagtatgagtgaagatttcatgagtggtatgatcgaccagattccggaacaggcaaagcgaaatctgttcatcattccgattgagcctctggaagagcgatacactggcgagtggtacaagttcctgccaccagcctttgccaagcacaatttcaaggtgacccagattgatggcgagactctgaccgactcggttgagactggtgcattcctggatatgaactcgacgatcttctacaaggcatctcagatgcagaagattgctcgcatgttccgtgagaagtctgtgcctcatggttcggtcttctttgtcagtgacttggaattctggggcattgaatctctgcgcctgatggcacagatcaacaaggtcgagatcaagatctatggcttcctgcatgcggcttcgtacaccactgaagatgcattcgcagttgcggcaccctatcagaagtatactgagctgggctggctgaaagctgtggatggcgtctttgtcggttcgcactatcacaagaaggcagtgatggaacgtcgtgtgaacgcgttcgcgaatgaagctgaccgtcgtgagattgagaagaagatccacgtgagtggcaatccactcttcccgagcgcatatgacacgacttcggttggtccgaagaagaacaagatcgtgatcaccaaccgattcgattctgagaagcgcccggatcagagtttgctggttgcactccttgtcaaggaagcactgcctgatacagagattgttctgacgaccagtcgtccgactttccgctcgaatcagaagtggttggttgacctcgctcgcatgtacgagaaacaaggtctgatcaccatcaaggaaggattgaccaagaaagagtatcacgacgagctcaagactgcgaaggtcatgatctcaaactctatcgaggaaaacttcggttactgcattgtagaggctatcatgtatgacgtggcgcctgtactgactcgaggtctttcgcacgttgaaattgttcagggctttgaccagttcctgttcgacaccaacgacgaagcagtaagtaaggttatcacattcctgcaacgcgatcaacttctcaacgcgaagcacttcttggattcttactttatggctgctgacttcatgggtcagatcatggcccaaggatgatatgacagataactacaacggaaacgaactccactacatcgcaagcggaacgtctttcatgtacatcaactcactccgtcgagatggcggagtgaatgatgaaacgattgattgggtacgcaacatgttcgtaggagcagatcgtggacctaacaaattcggcatgctgttcaacgcgttcactgaatcgaccttcggtaaggtgttcaaggagaactatgctgacgtaatgtgcgacattcacgcagactcaggtggtctgcagatggtgtcgcttggcaaggttgctgatgatgcagctaagcgcaagatctacaagactcaggctgattacagcactgtggcaatgtcgttcgacgaaatccctgtctcgcagatctttgatccgtatgctggacgtggtgcaatgtcggctacgcgtaagaaggtcttcgatcgctctcagctgaaagctaaggcaattgaatcaggaaagaatctacgtgaacagcttgaatactttgcggaagtcgggacgatcgctaagcctatgcttattgctcaaggcaattgtccagagacctattatgactgggttgagtacgtccaggatcagatccctcatgagctcatggacaatatcgcaggcgttgcagtcgcaacctcgacgcttggtcctggagatctagagaactacgaatcggcgtttgttgcttcgcagatgaatttccgttttgactgcaagcaaatccacttcctgggtgttggttcgtttgatcgtcttgctcctgttctggcactagctaagtcaggcgtctacaagaacaagatcatcagctacgacagcactactcacacaggtgggcttgctcgttcaagattctacacacgacgtcctgacggcacctatgttggaactcgtctgttgcaatcggatggatatcgcccccgtgattatcagttcatgatggatcacattggcaagttcaacatcggcttcgatgatccggaatcgctctacaagtatttcatcacttgcccgagctattctgccgttgaggcgattggtgagtcgcacaatcgaccattcattccaaagacaaagattgctctgttccgatattcgtacgataacttcatcacacagattgaagagtatatggattcggacggatacatgaagggcattcgtaaggcgcaccagcatcctatcgcaggtcttgctgaatgtcgcactcgttccgacttcaatgtctggcactcgacgttcaagaacgttttgaagtcggacagagttcgatcgaagcaacagagcctcgaagagcttttcggttaaagacatagcatccgttgattcaccgtcacggatgctatatcatagttggaccatttaggagaaccattagatgaaaaagatttgggtaacattccggaaggcaggctttcaccgctacccagcagccggcacccaaggactcgaagacgtcgcgtaccttgcacaccctcaccgccacctgttccacttcaaggtagccattgaggtcttccatgacgatcgtgagatcgagttccaccagttcctcaacttcttggaagaggctgttgcactcaacggtcttgattacaagtcgtgtgagatgattgcagatgatatcgcaaagattgttgctttgaagtatcctgcactctaccgaacccttgaggtcgaagtttcggaagatggcgagtgcggtgttcatgcaatctatggcatcagcaatggcgaggtattcggctaatggcactgttcgaagtatcggaaatcttcagctcgttggaaggtgaggcacaattcaccttccatccgactacctacattcgttttgcacgatgcaacttctcttgtccgttgttcaacaaccctgagaagctgattgatgcaaagggctacgcgcctctcgatttcgatccgaaggactatcaacgtctggaagatattccgctgattcacaaaggctgcgatagtcagtatgcagtcaatccgatcttcgcgcacatgtggaagaagtacgacacggacgcattgattgatgctctgttcgaggttcttcctcagggtaagctcatctacagcactggtctacctcagatcatctctttgactggaggtgagcctactttgaagtggaagttcattccggagattctgttccatcctcgaatgaaagatgcacgtcactatcttgttgagacgaactgctctgttccgttcaaggacgaattcatcagcaacatctacgagtggcttgcacaagactcgcgccgcatttggacatggagcaattctccaaagatctcgtccagtggtgaggatcgtaagcaagcgattcgccctgagattgctcttatgcagcacgttttgacgcacaacttcccggggcgtgtcaatcagtatttcaagttcgtcgttgacggctctgaggctgattacgctgaggtgaaggaagtgatggagatctactacgctgctggtctgcctcgaactgttccgatctggatcatgcctcaggcttgcactgacgaacagcagaaggttacggcgcgcagcattgctaagcgatgcattgatgaaggttggttgtactcgcaccgtgtgcagaatgatctgtggggaaatggcgttggcacctaagatgctaacgtatcacgaatggatggttgcccacaaatactggggcaactatcacgccgagtacggcaaatactgtgctaagtggagaagatataatgaagatcagaatcgaatggacaagcgatagcagtgattgcgaaacctgtggttgtaactttgccgacggtgcgaacgtctacattgatgaagtccttgcactagagttcattcctattgctcactgctacgacggagacgatttcactcgtgattacgtgtatgcgcaaattcttaagcatcttgggcatgaggtcatcgagggatgaacgagattccgatctcagctgcacagcacgtagcgaagaagtatggtttcgaccagatcataattattggacgtaaggtcggctcccacgagcacgtcacgacttacggcgttgacaaagagaactgcgacgcagcagctcttgcaggtgatcatttgaaatacaacgtgatgggttggccaagaccatgaacgatgagaatcgttggactgtgtctggcaactggtatcattggaagtggcggcgcctagcgttcgccccgacctgttgggacaaaggcatcggagattccgatggcgagtggttctacattggtatgggcttctacttcctcatcgtcgacctaagacaaggaggattactatgaaactatttcgtaagagctatgatggcggcggagattccggcgtcacaggctattggttgattgagtgcaagtctttgttctcaatcgtattgcttcactttgaaggcaagagtcgcgaggcattccattctcacgcattcaatgctctgacttggtggctcaagggagccgtaaccgaggagatgaaggatggtcgaatcagaacttggtggccttcttggaaaccaaagtggacgccgaagaactgcttccacaagattcatgctgatcctaaaggcgcctgggcactaagcattcgtggtccatgggatgcaacctggtttgaatctaagaacggtgaaacctatgaattaggtcatggtcgtgtcagaattaatggtctagttgagcaggattccgaatgagtgaagtaacaaatgagcgccttgttctctcggcgctggtaaagaatgaagagtacatgcgcaagattcttcccttcgtaaaggaagaatactttgaggacgagtcggagaagcgcgtcttcaagatgatcaatgcctatgcaggcaagtacaatgagatgcccgacaaatcgactctgatggtcgaggcaaagaacgatcgcagtcttgatgaaggtcgtagtgctcgagtaattgaaacagtcgcagacgttttcagcatcatccctagccagaacttcgattggttgaagcagatcacggaaacctggtgtcaggaacgagcagtctacaatgctctgcaggaaggcatcgcagtctatcagggtgagaacacaaagctctcgattgcagcgattccggacatccttgcaaaggcgatcagtgtcacgttcaacacacaggttggtcaagactacttcgatgacgctcagctgcgatgggacttctacaccaatcctgagtcgaaggttccgttccgaattgacacgttcaatgagatcacttcgggtggtctgactcgcaagacgctgaacctgttcgttgcaggtaccaacgttggtaagtctctggcactggtcagcctggctgcggattacattcgcgatggcttgaacgtgctatatgtgtcttgcgaaatgcgagaggaagttgtgttccagcgagtggacgcgaacatcctcggcatggatatgaacaagatcactgacattggtcaggagaagttcctcaatcgcatcgagtctctgaaatcgaagtcgtacggcaagctgaaggtcaaggagttcccaccgacctcagcatcgactttgaacattcgtcagacgctcgacgaactgaagatgaagcaaaacttcatcccagacgtcatcattgttgactacctgcagattctcgcatcgtatcgtcttgcttattcggttggctcctactacttcttcaagtcggtggcagaagagcttcgtgctctggctgttgagaccaacaccgttgtgtggtcagccgcgcagtttaaccgtggtcagatgaacgcgacggacgttgacatgagcggtatcgcagagtcggcaggtatcgctcacacggctgacggtatgtgggcaatgatcagaacggatgaactggatcaggtgaatcagcttttgatcaagcagctgaaatctcgatacgcgaacaagtcgatcaagaccacgttcacaatcggtgtcaagatcgagcatcagacactctatggactggacgatgacaggtcaggtgagttcactcaaatggactcgaagattgtcacagaccagaactcgctgaaggacaagttccaaagcgctaatggtggaagcaaattccaaggatttgaagtgtgaaagacgtgtggccagaactagtcaaggaatacgagcctctcattggggctctgtatcgctgtaatgaacacacctacaccttcttcggattggtgcacggtggtgacgactattactatggcatgtggcaacatggaacaggcaagtgtgagctcttgtcctgtgtcggcgcgcccgaatccttcggatacttccgaacacgaaacgcgacgagacacaaccgagtcggctacgctgaaatctgagccgaccgcagtcctatgtccgccagactggcccagcttttaaaagcgtatccagtaagttcctgattctgttgatattcttgacgggaagccctgctcagaaccatcaatagaatcagacacttacaagcctagtactgctaaggggtgtaccaggctcgagccagatgaccactcaaggtgacaccccggtttcccagggtgtcgagtggcctgcattgtcagatgtcagtccactatcagaagcccttgatcagggtcgtgtccgccatgtccttccagtcagcggcagaggtcttcatgaaaccggcgagctggttcaccgtacggatcgagactgaccgcaggctcatcaagttgtcgttcatccacttgacgcactggtcaacctgcttctgatccagaccgaggtctgcacctagggtcgattccttgaggacctgctcgacacgaaccatgatggccttcgggttatggatgcacaggtccaggaagatcgaccgactcatgagagccagaatgtgcggagccagtcgaccttgcttggcgacgatgcgatccaggtcgaggttggtgatgaagacgatctgaccttcgtactggaatcggttcgggatatcgctgtctgcgaggtacttcgatgccttcgaccagctgatggtccgaaccgcactcgtatccagcgccgccttcagaatgttcagtgcttcttcgtcgtagaacacgcgatccacgtcgtcgagcagcagcacctggcccttacctcggttcttgtagagcgtctcgtagagaccgacggcgctgatcgtgcccttggtcgagtcgtaggacttgatcttcttggtgcgctctgcttcttccaactggcgctccaaagtgaaggtcttaccgacacccgccgaacccgacacgatcaacgaacgaatgttgccgttgaccatgccctgcccgagcttctcgagcatgttgaagcgcttgcggatcatcgcagcatcaacgggcttttccggaacctcgacggcgctgtcatcgtcatcgtcgtcatccgaagcagttgcctgagccaagccggctgctgtaattgcccaaagaccacgaccgatcttttccagctcgccctctttagcgcgcttcaaatactctcggttgaactgaccaagttgacccgtcgtaacggtgtcgccaaacttcattctcagttctttcttcatcgtagcggtggtgctcatgatccagttccttaaagtggttttgcctgacatctgacaaccacaattatacggatttcttccccaggaacaacctacgtaagtgtctgattctgttggaaaagccaaagctaccaaggattcttcggtacacaatcgaaggattctgtgccgttctggctcgatccactagaattggacgacataaaaagtgaggcaattcgtcatgggtggcaatgcagttttcaatgatctttcggctcagccggtctctatcgtctgtcaagatagcagggatttctggagagcgaaaattgagcatctcatgctcacaatcaatcacgtcgcacgtcgaaccctctgggatatgagtgcaggcgccaagccttatcttgcaggctcaaccaagttcatcttcgatgacttcatccctacagctgagcttgtcaagtacaagacttccttcggtgacattgacattcaaattgatgttgagaagggagccgacttgatgtctgtcctcaatcttattagcgcaaatgaatgtgcaaatgagttccagattgtcgggtggcagcacacagtagacacaatcgtgaccatgtggtacgatgaagatgtgcagcagacgttccaagttgattttgagctcgtcgaattcgccaacaatcgcccgacgaactggtctagattcagtcgatcgagttcctgggaagacacctgcgccggaatcaagggatttgctcacaagtacatcttccgtgcgatcactgctatctggcttcgtgaagcgcaggtccagctcaagacaaagttcgtcacaaaaaatatcagccctatcgtgttcagcccgaagggtgctcgagtgaagtggcgagagattcgtccggacgtctggcaagagattcctatggacgaggaagctctaatcaagaacgtcgaagacctgttcaagctattcttcaaggtcaagccagatgccgagtcaacctgtgagatgtattcttatcagggcgtcgtcaatctgatcctcacctggattgacaaggaagatcatcttaagatcgccgcaggtatgcgcaatcttctttggggtccgtatgctcagaagctgtaccgagacaatcctgcacgagacttctatgaaaagggtcaggcttatttgtatctgacagagactctgggaatcccggtcgagcccttcttcggatcggagaaatactatgagacgtattgatggcgttcttcaagacgattgatttcctcaaaagaaacaacgcggctattcttatcaacatcgtcttggcaaaggacgtcatgacgattggtaagaaggtcgacggtgaaagagttgtggttgaggctttgatgctcggtgacaagccatccgagagtgaggaagagctgacccaatattgtctcacagtgaaaggttcacctccagcactctgggcactcgacaattggttccctgtgacacggttcttcaaggatcccaggttcgttccaaagtcaaccatcaagggaacacctgaggtacgtgataaggagttccagcagaggcaagagaagtcattggttgacgtcatcaacaagtggagtcaaccgatcaagctggaaaacttccacatcaaacgagccgaacaggctcctgagattggaccacacggaaaagagaacctagttgatgtcgtggtatgggacgaacacaatttttcgtataatgtgagctgtaagatgtctaaggcagctgaccttggctccggtggcattgctggattgcagaagtcggttcctgagttggtgaccaaactctactatcaagtcaagattgatctgtatgagttaggtttcgaggaagggaaggtgtacgatattcgtaacatcccgactgtgatgtacggtattccggacatctacgcgtacaagatgttcgccggatcagatgaggttggtggcaagattgatttcatctacgttggacccgatcaggttgactacaatggtgaggagttcaacggcaagttctggccagtggaagagtatgctaagaagaagccatactacctgcggctgagaaagagagacgttcatgcgaacatggttcgtatcaacttcactaagctcaactcacacggacttccttgcattttcacaacaggattgggcgactttgcagcagcccgtttcgtaattgatgatagagtgccacctaaggcaactgtgaggcaactatgctagtagcagagaagaagcggaagaacatgaaacacttccgcgaaatgaatgatagagtgttctgtgaatggatccttggatatgaagtcgatcagattgatctgagttggaagctcgacggattcttcctcaggttcggaaaggacaaagagaacaaaccttggttccagactgcacgctcgcctgtgctctatgatccgatggagatcatctggcactcgcttgagaaaggctatgatcacactggcatgagccgtgctgaggtctacttccatctcatcaagaccatctgggattcgaacatcatgaatcacttgccagaagactctggcttcgagtgtgaagtgttcgacaagtcgatgtctgtcttgaacaaggagaacaacaccagaacgttcgtgaacattccgtacgacgaagagttctttaagacagatctcacgttggctatctacaagctcattgaggcagcaacagctgagacatggattgatgggtactactgtgacctgaaactagacgacaacatccagacattcggcactcgtttcaagattgacttcaccgcgaaatactatttcgagtgtggtgtcaaaggcatcacaggcaacggaaagcttcttcctattctggaatctcgccgacaggcagatagagaaaccaaacttggaatgaaggcagtgatcgcaacactcaaagatcaattctgttactatgtcttgaagcaggctcaagaccatcacaagatgggaaagaatttcgaaggggttgtcatcaccgtaaataagacagagtacaaaattgtcacagactacttccgagacttgatctacttcaagggagtgatgggtggctaattttgacttgttcttcggaaggttccagccggttcacagtggacaccttgctgttctcgagaggatgaacaaccctgttgtcgtcatcgtcaaaggaaaggtgtcatcgaaggacacggagaagaaccctttcgactttgcctatcagaagatgcttctagagaaggtgaagcctgatgttagggtgttccagtcagagactggatatctcccggacattatcaagatgcttggtgattgtcctgatgctgtctactgcggtcccgatcgcattggacagtacaaggcgcagatggaacgcgccaacaaagagcttgatgagccgtgtctcgtcaggttcattgaaacggagcgtgtgacatctgcttccgttgttcgtgaggccatccggtctggcgatagaaaagcctttaaggccaatgtccctagagcaatctgggatcagtactcaacaatgaaaaagaggttagaaaatggttgacttgacagtaactattccgtcgttcgaagacttcctggcagaagatgcaaaggcaatctcggatgcaaatcatcacaggaagaatggcgacggcgaaggctgcgacttgaagcctgttgtttcggacaagggctcgaccactccagaagtgattgagaagtcggacaatgctgcacctggcgacgacaatggcgaaactctgcctaagccaccggtgagctaagatgagcgaaggcgccaacgtaactgcaggtgtggcgaatccagacaacgtcatgccacccgagaagccacagaagcggaagggagaaggagagttcgcaaaggaaatcaatgcggctgtctcacaggctggtaagaagctggtagagtctctgttggaagcgaaggcgcctaagcaatttggcttgggcgacaaagtaaaactcaacggcaagcctgggcgaatcacttcggttgtcagcacgacagctgaagatggaaatccggggactcactggaaggtctctatcaggtacgaagatggcaaggaaaagacttacatgtctaaccgtgccaagatcgttgtggtagagaagcaccctcagtacaacaagcaagcagaatggcatcaaaaggatgctatggcagctaagcgtggtgcagactacactcgtcaccactctgagatggccaagtaccatgataccatggtcaagcatcacgactacgaaggcaacactgaagaagcagacaagcaccgcgaagcagctgtgacgcatcgtgctgaatctgagaagcgtgctaaggaagccgcagcaggcggaggctttgtaaccaagcgtgagatgcagtccaagcaacagcaagcctatcgtaaccatgtagctgacgaacgcgaaaagaagcgccagtgggaagaagctcgtaagacagccgcggctaatcgcaagtcctacaagcactactactctgttcctttcgctgacaaggatgaagctaagtcgaagggattcaagtgggatccaaacgagaagaagtggtacgttacttctcaattcccgaagccaggcacaatgaagtggaaggcttcgcactccgtcgatgaaaagacaggaaagaaagtcgatgattgatttcgatacatggttgtacgaagatctcaaagttcccaacgccaaggatggcaaagggaaaatgcgtcatggtatgccacagcttacgcagtttgatgcgttcatggcagacctaaaagacaacgacattagcacagaggtcaagtctttgagcccatggaagttgacgcctactcaaggcaacttcaatgaggagaaggttgactacctgatctccagtgctaaatgggaagcgaagcctataattacaagtgccgacggctatgtcgtagatggtcatcatcgttggttggcggcagcaaagttcgggaagaagattcaatcgagagtcattggcatggattgcgatgacctgttgaagttcctcaagggcaaatcctatgttgaaacaaagacaattaacgagtgatatgaatggcgcttcgaacccctgcaccaattagattttctctggagattccagagctaaacaagacgatctcctatcgtgcccttaaggtcggtgagcagaagtctctgttgactgttcttgagctgaaggatgcttcggcgatcatcaacacgattgtagacatcattgatggcattacgtttggcgagcttgatcttgctaagacgcctatgcatctcattgatttcatcttcctgcacgcatacatcaagtcgtcaggtgctcgctcaaaggctgagtacacctgtggtggcgagatcgaagtagaagaggaagtcgagatcgaggaaggcaagaaggaaattgtcaccaagactgttccttgtggatccaggcacgaactgctcctcaatctcgagaatgccacgattaaatatccagaaggatataaggcttctaagctggtacagatcgatgactcgatgtctatcaaactgaagatgcctgacttcgccagcttcaagaagctcgacctagacgcagacgtcattggtatctcagaccagtacatcttctctggcattgagtacattcttgatggcgagaacatgtctgtcccgggtgcggatttcgacttcgatgaaatgacgacttggctcaacgaactgccttccacggcgcttgatcagatcacggaattcttcgaaggcgttcctgtcctgtcccttaatgtggacgtgacttgccctaagtgcggcaggaaggatggtttcgagcttcaagggctcgacgattttttcctgtaatctatccagctaacaagctagtagacatgctagaactgaggcacctactagtaacagaacacggatatcgtctggacgaactggatgatatgcctttgttcgagattgaaatgacctctttgattgcagttgaaacccagaaaagaaagatgaatcaattaggttaaggtaaaatgcttccagcacttctaagaacagttggttcttcattgttgagatcagaggcggttagtgcaggtgctaaccgccttgtcgtcgcttcgagactcaacaaggttgcgggtaacaagctagttcaaggactagcaaaacactctggagcttccaaagttccggcgctggataagattggtagctatctcagcaaggtgccttcaggtaaggaaaaggagaagaaggaacgaggtacatccacttcttcatcttctaagaaccgcgataaggcccgtgatgatgctgccaagaatcaagagcgtcaagacaaggctgagaaggaatccctaggtgtacaggaagagaatgcaagccttctaaaggtcattgcaaaggacactgtacgcgtccgtgatgcggtcgaggccctggctaagaacggtgtcggtggaggcgcgggcggtgatggaatgatggacaagctgctcaagaccatcacttctctgccagcactgctcccttctcttctcactggtcctgcgggcaaacttggcggctttgtaaccaagtttgcatctaagattcctggcgttggaagactcatggggtcaatcggaggcatgggtaaggcaggcgaagctgcaacgactgtagctcgtgcgggtgtagctgcggaagcaactgcggcaagagcaggagccgctgctgttggacgtcatgctctccgtgatcccaagacaggtcgattcattgcacgtagcgcagtacaagccgccgaggttgctccaaagggcattctggctaaggctggtgcagctgctgcgggtgttggtggtgcaaagattgcaggtaaggcaacaggcgcgattggtaagggcatcgcaaagacggcaggtaagtctctgctcaagaagattcctatcattggtgcaatcgcaggtcttggtctggcagcaaaccgagcatacgcgggtgactggacaggtgcaggactcgaagcagcttctggtcttgcaggaactattcctggtattggtacagctgcaagtcttgggcttgacgcggctatccttgcgcgagaccttaagaatgacggaagttcgacacctgctgtaaccgcagcagccaagccagttactgcatccaagccttcggtgcacacggctgcaattgcagctgctccagtggtagcgcaacgcaaaaccgcggcagcgactgactccatgcaggtcactatggcgaagatgcttgatgtgatgactgatcgctccaagggcatctacatcgtgcctgctgaggttggagcatccactcttcagactcgctcgccttataaccctcaaggtgttccaacaggaaacaaatacgagccaatcgtcagtgcaagtccatatgattcagcaccaagcagcatcggtcccgctacggcaggtcgtacaatgggtgagggaacatccgtaacctccggtcagacaatgcgaggcggtcgtgttgagattggtccaacaggaaactttgaacgagatcttctgaatcagattgcagcaggtgaggcaggtaaggaaggctacgactcggtatggagtggttctcgtgtcaagccaaccaagcctgtgtctcagatgacattcggcgaagtgatgcagtggcagcgtgatacgctcaacgaacaaaagagccgaggcatcccagcaaatcgtcgtagttctgcagtaggacgttaccagttcatcagtggtacactcaaggcacagatggctgcggcaggatttaaggaagatgatctgttcaatactgagaatcaggataagctcgctcttactctgatgaaccagggtggcaaccttgacaagttcaagtcgggtagaatctcagcggagaagttccaagattacattgcatcacagtgggcatcacaaaagactgcaagcggagcaggcatgtataatgctgcaggcttcaaccatgcaggtcacagctcacttggattcttgaaggcagctcaagcgtcaggttctctgacggcgtcctcaggttctccaactgcaatggtaagagatgctgcacagcagaagcaagccgcacgtatggcgccgatcgttgtcagcgctcctacacaggtcgttcaaaacgggcaaaaggaagccgctgctccaagaacaacggcttcggcaacacctgtcattgtgcgtaatccggactcgccggttcgctcctacgtactatcgcaaatcaggacttcttgagcttcttcttgagctcttgaatctcatcgtagtacttctgagactgggacgtcaattcggcgttccagactttgcattggttgagtcggtcaagatagagttgagactctcctgcgaaactccaaagaaattggctagtttgtggagaaagtagttctcctgtgttggtgttggatccgttactgccgctggtgcttccttgaccaccggtggatccggaattaccacttgctgatgggtcgcgcaggcggataccagcaagcttagacacagcagcatcgagagaagcagtgcgcgccacataggctttgtcgagttcattctttttgtccttgagactggtttcaaatgtcaatttgagatttgcagatgcgccttcagccgtagccaccttggtcgccatttcggcaacctcggctttgtgcgtagcttgaatggcatcaatttgtagacccttgacataccagattgagcctgcgccaccacctacacccagtacgagtgcgatgccgatgccccaaaggaatgtctgggtattcaatgcgagtttgcttagcattataggtgccccagattgtaacgattagtgacgtcctttaggatatcgacaacaattcgatttggccagacgtcggcgccaatcgaccaatcatattgatgcaagaacatgagaatagcttttgcgacactgaattgaacatcattcaggagcactcgacagatagctgttaccttctttggtccaaagacatttaaagtgacaaccatattattgatcagcaacttctcattgatttgaccggtctttagaaaccggtcaatcatcttccttgtagtcatgaagacagcaaagtctttgtcaaaagtcttggcatggaagacgcctttaccataaccaccaagggcgatctctttcgccaagtctttcacatcactcatctgggggaccttactcggcagccttcttgttgttcttcttgctggtctttgatgttgtcttagcagccttaggcttggtctcttcgacttccttggcaacttcctcgaccgacttggtctcttccttgattgcctgaccctgctcttcgctgataatagcaatggcttcaacttcaccagcatcatctagctttgcgatagcaccaaccggagcatctttaaggacagcttcgattacatcaatagcttcttccttggcaaaatcgccagtctctacagaaaaagcatctgccttgatagcagcaatctcatcttcgcttagttcacggctccctgccggcgcgatcatatcctgcaaatcttcaagagaatgcgtgcgctttgaccaaaccactgcgtcgggcaatccacgaatcgacacgacgagctcgccagtgcttgggttgacccatccgaggtgagtagcaactgcacccttcacgacttctttagttctatctaccatcttgtttcacctttaattggacgaatgcacggcaccgcattaaaatagatcacatgaactatctagatttgaaatacacgaggctcgtgtcaagttatttacctgggtggaaggaggtaagtgcaaccttgtctcgttttcgttgcccgttctgcggcgactctcagaagtcggaatcgaagactcgtggatacttctatcagattgaaggcaatgcgaatttcaagtgtcacaactgtggcgcttcgatgggcttgtattctttcctgaaagaggtagcaccagtactggcgaaagagtacacctttgagaaattcaagggagtcaaggcgttcgagactgatccttttgagaagttcatctcgaagccaaagtttgcagacaagactctcttggatgattgtcaggctatctcaactctggaggatgaccataaagcaaaagactacatcaagggtagattgattccggaaaagttcttcggtgatctctactactgcaaagatattcgtttgattgcagacaggcttgatgactatcgagaccgagaactgcctcgtagtgattgcatcatcattccgttctacaatgaagcgaaggaactggtctacatgcaggctcgtttctttggtgacgtttcgatcaggtacatcacactccagattgatccgaacgcaaagaagctgtggggccttgacagggtagactggagcaagaaggtctacgtctgtgaaggaccgttcgacgcgatgtttgttgagaactgtatcgcagtcgcaggcgcaagtatcatgtctgaaattaaatacctgcgagaacatgctaaaaaagaccttgtcttgatcttcgacaaagactatcagacaaatccagaggtgtatgggcaattcctcaaagcggtcaatcaaggcatcaaggtcatcatgttcgatccgcagttcgctgctaaagacatcaacgcccaggtacaacatggaacaagtattccagacctacagaaatatcttgagaaacggactttctctgggctcggtgccaagctcgagcttacgaaagttagacgtccactcaagagaaaataatggcacgtaaacctcacaagtcgccaaagacatcgcagcatgatccactcttcgacaacttcaacctcgaagcaaagggatcaggtactcaagccgaagcacgccttgactgggaggcaggaaagaatcttgtcctgaccggttatgcaggtacaggtaagacgtatcttgcgctcgccctagcactccaggccatgatggcaggagaggtccgacacattcacatcgtccgctccgcagtttcttcgagagacattggtcacctacctggtaccgaagcacagaaactcgaagtctacgaaagagctatcaagtcaaacttcaacaagatcttgaagcgtgctgatgcctacgaatgtctcaagctgaagggcgccgttagttttggatctacttcctttgaaaggggtgtgacatatgacaaaacctgtatcattgtagatgagtttcagaacgcctcattcgcagaacttgatacggtagtaacgcgtctaggtaatgactccagaatcatcttctgtggtgacactcgacagacagatttgtctcctggtaagagtggattccataggtttgttcgaatcgcagatgcttgcggaaagttcttcattcgccatgagtttggcatcgaagacatcgtaagaagcggtttggtcaaggcatggatcatcgcagccgaagatgatgcaatcaagaacaacccaacctgagaaatgaaatgattatcactgatgatgtaatgacctcgctgtccgatactgatctgtctgaaggcactacgagcgcagcgaacctgtatgctcaggcgctgtatcgtgatctggttcgtcaggcactcgctcgtaagagtaagcacaatactgctcgtgccctccgtggtcgtgctcgtattgccaagcgcaaggctaagcggaagtcgtaacatatgagcagcaagaaccgtcgtgacgaaaccaacgtcgaccacttcgcttctagtaaagaccgccgtgccgagaggaggtcgaaagatctcctccggcgggcgcatgatgtggatgaagattgggacgagtatgaactagactctcgcgagattcaccgcaaacgaaatcaacgaatggattaatcatgatcgttattgatatgtcgaacctcgtgttctcacaggttctcgacttccatcttaagaccaaagaacaggttgacatgcccgtcgtgcgcaatctgtgtatcgacaagatgaagtcgcacaaagcaaagctgggaaaagagttcggacctgagattgttctggcattcgactctaagcattattggcgtaaagacatcttcccttactacaagggtaagcgaaagaagggtcgtgacgaatccacatttgattggaaatcgttcttcccaatgtatgatcagttcaagcaagagcttcgtgattacttccctgtgaagtgtctggaagttgaaggcgccgaggctgacgacctgatgggtgtccttggtcctcgttatgcgcctcacactccagtatgtctggtgacgtccgacggcgatatgatccagttgcagcatcagaactcgaacatcaagcagtggtcgccttggcacaagaagttcctcactccgaagaatgctgagtatgatctgtttgagcatatctgtcagggcgatgcaggcgacggtgtaccgaacattcttagcgatgacgacaccttcatggctgatccgaagaagcgccagaagcctcttcgcaaagatcgactggctgagtggaagaagcacggcatcaccaatccagaatacttctgtccagattcggcagcgcttgatcgcttccaccgaaataggaagttgatcgaccttcggtgtattccggctgacttaaccactaaaattgttgaatcctatgaggcggctgtgcctgcaacaggcaagatgttcggttacctcactacgatgaaactcacaaagatccttaaggaaggcggcttctaagatgccaatgtacgacttcaaatgtaagacgtgtgatcatgttcaaactgaaatcatgtctattgcccggatggaatcaggcgaagaagccgtatgcaaagagtgcggtggggtgtctgcaaagaccttcaccgcaaccaattgggaagctgcatcggctgagtcacttggtcggaagaaggctcctgaggacttccgaaacttcttgacacagattaagaaggcacatccaggtagtactatcaaagatcattaatcatggctaagtctgtggcaagtttgatgggtggcggtccttcaccccaagtaagacaacaccttgaaaagttcatggccaagaatcagtccgagactgataggtttattcatacatacacgtcactcctagatggtatgtatgatatcaaggagacgatcaagtctacgtcttacagtgaacctgaggaagtgaagttcatcacaggtaaagtcaagcaactccctgaccccgatgtgaactggggcttctcaactattggtgattcactttatgactgatctcattcaactgcgaaagctcgtcgcagaatacaaggctgatcacaagcctctcgaacgataccctggtgtaactcgtgtcctcagtggcaccaaagacatgacggggcttgatgcatggcgtgatcgaattggtcatgaagaggctgatcgaatcgttgccgagtccaagatgattggttcctcactcgacaagatcttcaacgattcgcttgagtcggtcatcaatcaggtaccatttgaagaatccctttatgagaacgaggcaggctataaactgtttggacagttgaagccctacttgaagagaaccgagccggtagctgtccagcttaaggtctggtctgatcacatgaagatgatgggttacctggattgcctgggtctttatgatggtgtccttactctgattgattgtaagaactccaagaaggaaaagcgagaggaatacctcgaggactactacctccagtgtactgcctattcgatgatgctgtatgatatgcttggcctaaagatcaagcagatggcacttttcattgctcgacgcgactcgccattcccgcagatcgtcatcagagacatcaagccgtttgtaccgatggtgttgggtcgagtaagaaattactatgggaaccttgcacaatgaaaatcaaaggcactaagatcgaaacagtcgatgttgatatcgatcctttggaagtgatcaggacttgctacaaaaggtggaagagtactactcctggcgagttcatcaggaatggtaattggtatgtcgaggtgcacacctcacattcgtatgatgaattggttggtccagtgtctgatcaagacatggaaatctacaaggcattccagatcgtctcagaattaatctcaggaatgaaatgaattacagtgaaaagatcctcgaggaactgacgctaagagcaaggcgagacaacatcggcttgttcgaggcagcatcagactactgcgaggaacatgatttggaacaagccgagttcgttgaaacactcgaccctatcatcatccaacgtctcaaagaagacgcagcccgtgaacgtaaagtcagaagatgcgtgcagaaaccgtccaaaactcttttctgagtgcaccactcagaacattccaagattatgtcgggctcaagctacacttcaacggtgacctagtatggaagcgccacatggtgctttcacttcgtgaggagcagctgctcaaacgaaaggacgcatactatttcatccagttggctgagcagcatgatcgcgaaaagatcatccaaatgatgatctcgatgttcaagcgaaagcgtgactcttggattggtgagattctcgaggaagagaacgtcgagtatcacaagaagcggatggctgtaatcaactcgttgaagtacgttattcgtaccgacattgaacgcatcgtgttgttcatggaggacaataagatagatgttcgtaaactccttttgtcggacggtcaaagtccgtatattgtatcacaccagtcggacattattggtggtgtgaccgacgagacactcgccctgttagagagggcgttcaagttttgctcacaggacacgttggaccctctttgggaagagcgcaagttcatgctgggtaaatacagtagctggattgaggtggacggagacttcctgaaacaacaactcaaccggctagtagaggcgaagtaagtccataagagacagtaagacctcaattcaaatagagaaaacggagactaaagatgtcatttgcagcacttaagaagcagcgtggtaatttcgccgacctcagcaagaagcttgctgatgaaaagaagggcggtggtggtaacggtccagatgagcgctattggaagctcacgaccgacgaagctggtaatggttacgccgtgatccgattcctcactgcaccagtgaacgaggaatacccattcgtcaagatgtactctcacgcgttcaagaacgatcgtaccggtaagtggtacatcgagaactgccgctcgaccatcaatgaagccgacccggttatggaagtcaattccgaactgtggaactcgggcattgaggcgaacaaggatctcgctcgtaagcagaagcgcaatctgaagtacatctcgaacattctggtcatcaaggactcgaagaacccgcagaacgaaggcaaggtcttcctgttcgcatacggttcgaagatcttcgagatgatcgaagctgctctgcagccgaagttcgaggacgagaagccgttcaatccgttcgacttctgggatggtgctgacttcaacctgaaggcatacaacggttccaacaagcagcgttcgtacgataagtcgggcttctcggcaccggcacctctgttcggaggcgacgacgcagcactggaaaccctgtggaacaagcagtacagcctgcaggcagaagttgctccggagaagttcaagtcttacgatcagctcaagacccgtctacaggcggttctgggcaacgctccaggtggacgtcctgcatcgcaggcaacgagccaggcgcaggctgtggaacgtgagttcgcagaaccggcacgtccggcaactcgtcaggagccagcagcatcggcaagtgacaacgaggacctgtcgcagtatgcagcgctcctggaaggcttcgacagttaaggtcgaaaccatagtttgattaaataaaggaacggcgcaggtcgttcctttatttttagctgacaagaatatgatcctacaagagaacagcttttattcagaccaatctggtctcgctacgttgctcacaaacaagcaactcgtagccgatattttctatatcaacttcctcgggtttgctggactccttaagatcaaggacgctcctgcgctgatgacctatgtcaagggtttgggtaagctccagctttccaacatgacagacaccaatgctgattggagcctggctatcaagctggcacatgatgcaggtatcatcaacatggtcgctgccaatatggcaacgaagttccttgcactggtcaagagcggaaagattcgctcagctgaccttaaggacgatccaatccgagatatcatcaaggcttgccgtgtaatcagcaacaagccttcaccccgcatctatcaggctgttcaagactttgttgatgcaaaggaccagctagagacgacaaccgtcaagctctggaagctgtctgcacgtccagagctaatgaccgcggctaaggaattccgtgaacagatcaccctgggtggctattcgtccgcattcctgaaacaccagtgggcaaatggaactgcaacgacgcctgctccagctgtagctgttcagcagccaccagcaaagggccagcgtggttcgttgccacctcagggtgctgcacatggttccgactcggattacatggctgctcttctccatgtgttcaagctcaaaggtggtattcacagctacctcgaacgtttcggcttcaagggtcactttgacgttgatcgtttcaagaaggctgtcgcatctcctgagttcgttctatctcatggctatcacgtgccttgggagcagcatccgtttgtccagtggattcgcaagaaggatccttcggcttcggcagctgtgctcaagatcctcaatgataaggatcgtcagacaggtgcaatcgctgtagcaactcaggtatcgaatactgcacctcaggcacccaagccagctgctgtaatccagactgtcgttgcaaatcgccaagagccgattgtgactaacgagtctatctctgagatgtacctcaacggatttgatcctaagcttcatgcgttgatgatgaagtatcattggcctaagggcgatgaagcgaatatcatcaagtcgaatcttcctaaggttctgagcgccctcaagacattcgaggttgatgagcttaagaagcctcatggtcgaattgaacagagcgaatatacgcagagcacctttgcgcgtatgcttcttggtaacggcgtgatgccatcccagatcaacggacctatctacaacactctgttgaagtcgggcgagagaaaggacgctgatgctgtattcaatcttctgatcgattacaacaacgcatccactttgaagcagaacgcgtttggtggcgacttcggtaatgacccagttacgactgcggtgtcccgcctgtttgatggagatggtgttgatttcattcttgatcacctgacacagatcaacagcgtaggattccagccaatcgtctatgatgcaggtaagaatctttggatcggaaacgatgccgaaacagagatgatccgtaacctgatccaatgcttgatgttgcctacgtcaaccctggacggaattgttcgtaacatcgaggcaacgtttgctcgtcttgatatcagaactggtcgaaccatcggaaagaaccttgcagttgacaaggaatccttcgataacaaggcgtctgcaaaggtcaagaagctcgtcgatgcagtgaataaggaaggttacgttgatatttccctgaagaagttcgaaggcaatgcaatggaggttctcgacctcctgacagttgccaagaagatcacgcagggtccttcatacgcaatggctgatcactttatcacggtgatgggtgatgctaaggatgggaagtttgatatcactcctgtgatcaagagccaggacgatctgttccttatcttcaaggcattgcagcaggcagcattctacatgaatgcaacatcccgtgctacggctggaactatcatgccttggctgtacgagaagatggctacgtctggcaaattgaactggtcaatgaccgaagctccgaatcgctacggcgagtatcctttcccacaggctaccaactatttcaagtatcttcttgataaaggacacactacagctgcgcgcgaagtttctccatggatgatctactacggaacaggtagcgatatcttcaagatgatcattgcgcagttccccgagctgaaggaagaagtcttcaagcgttctggacagatcggtcatggcggtacgacatttgctgcgattcttgatcaaaagtttgatcctgttgctatgccttatatcagcctcgacgcgctgacctcatttgttcgttcgattgcaatgcacggatcaattgaagatgctgtcaaggctgcgcgctgggcaagagaaaagatcatgaaggaacaacctgatcgtaagccttgggaacaagctagtccttctatggtaggtcttctgggaactgcttggttcgttgagccaagcgatcctcactatgatgatgcgctcaaggtggcttcaaagtggctgatctctactctcaagcaacaatatagcgaaagtgacatcaaactgttccaagcctacaacccagagttctggaaggtatggatttcagaaaagaagaagggcgctgagaatagtcctcacgctacaacctcactccgtggtatgatggacacttctgagtattcggaactctacatcaactgcctgaaaggccagggtctagatgcaatcaaggcgaacctgattgactcgaccacaggttgggctgctcagttgatgcaggttgcggattcggatgacattacgattgacgccaagaaggagcttgttcgtagattcgctcctgcgatggaagtcaacggtgttcacaccatccgagataagtcgcaccgtgactcgctcaacaagaactttgctgatgttctgctcgacgtctatgactcggataaggaccttgcagacaaaatctttgctgacctgccgcgaaccactcgtactctgatcgtaaagatgcagggtgagatggcttacatcgaagcaatcaaggacgacctctacaagcatcctatcaagcctgacttcccgcttgaccatgctcgtattcgtacgatcttgaagtacaacaacctggctatccgagtcacgtctaatcgaaacatcgttcagaccatcggtgatattgattcggcagctaagtcttcgatcagcaaggctcttgtggacctcaaggtctccgaagtgaaacaggatgagacggcgcttgaactcgagacaattcgtctcaacaagttccgaaacaacaagcacggcgaagttgcattcaaggttctcaaatcgtttgacgttgcattcccaggcgcaagcaagagaattgctgaattccgaaagaacaatcctcaggatggtacgcttgatcctgtgttccacggaacaggtacaattgccgcttcgatggttcttcgtaacggattccagatcatccctgcaaacgactcctcagctgtaggtcgtatgcttggtaacggtatctacttctccaacgtcatcgacaaggcacagcagtacgtcggcgacaagggtggtggcatcacgcgtagctatggtacacgtggttacatcttcgagatggaagccgaactaggaaagaaccctaaggactatcgttccgctggtctcggtcgcgactctatccgttctccggaatgggcagtgtttgatccggacaatcagcttcgcatctacaaggcatactacattgagcttgtaagcctcaatgcggttaaggcgatggctgcaaagcacaacaccaagttgaatgaatcggtaggtagctcatttgaagattacatgatggagaaaactgtggatacaaaggcaacatcgaagttctggttcatgggcgattcgttgcccaagtcgatgacggaaacttgcgaagtcagcgagttcaagtcgaagcgaaacgtctacacagaaccatcgtgggacggcggtacgatcgtttctatcgaacattcgctagacattgagccggtaacgatttcgattgatgacacggcgaagtggttgttcaacaagccagatgaagctaagttgttcttcgatctgatgaactgatctactaccaataatagctgggctcggaagggtccagctattatactatacgcacatcctatgagagacccgcatgagcgacgcaccatttcatctatccattgataccgaaaccctcggtatgcgcgaaaacacagttgtcctatccatcggtgtagcagcattccagctggtgccaggtgcgaagaacgactacgacaagatcatccgtgatggcttccatgtgaagttcaatgtcaaggaacagattgtcaattacaagcgcaccactgaccagagcaccattgattggtggaaaactcaggaacctgcagcgcagaagattctcaagccgtcagaagaagatgttgacatggcctctggtctgacgatgctcaatgactggatcaagcgttcggggtatcgctggaaagattcatttgtctggtcgagaggtacatactttgacttcccgaagctcgaacacatgtatctgcaagcgggcgtgaagtgcggcttcaacacctggaagattcgtgacacgcgcacgatgattgacgttctgactggctcagaaaacggacagtacgaaccagcaggtggcttcccgagaaacttcttgaagcacgacgcactacatgacgctgcaatggacgcctaccgcatggttgagatcttcaatcttgctgcaggcggcgagcaaaccgatactccgccctggaaagaataatcatgtactatgtgatcgaagacaatcgtcctcttcctgagtacgctttcatgtatgacacagacgtcaagggaccattttctcaccgaggcgatgccgacgaggctgcagaaaaatatgcactaacgcatagaaaagctgcattggtcgtggaagtgattggaagatatgacccatcaacaacctcgaaaaggttcaaatgagactctacctgatcgtaaaccgctatagcatgagtgtccaggctggcattcaggggatgcacgtcatccccgagctgtacgaaaagttccttaccccgaagtggaatcgcgcctacctgtctaatctttctgactgggctcgcaaccacaagaccatcatgctgcttcgcactttcggcggtgacgaaagtatcgaagagctgtacgaaaagattgcaccgcccgcgaaaggtctgcaaatgccgttcgctctgttccgtgaaggcgcgctgcggaactgtgcaactgctgtaggcgtcgtagttccgacggcttactacagcactccgatcgaagaactttctggcgacctgctgactctccgcgaaactttgagtcctttcccgttcgccatctaagattgttctttctttgtcatcgtttaaactgtgaacacatcaactaaaggaacaccgaagtgagcttgtcctacacccacagcgaacgcactgtcaagaagtacaccgtcaatcaggcatgcacctcggcgcgttatcgcctcgagaagagtggcctgaccagcctgtgcaccaattcgatcagcggtcgttcgggcagtgagctgatcactctcgaagagctgaacaagatcgctgacgccatcgtcgacgacaccttcctgtacgatggccacaaggcccgtcgccggtgataggaatgggtatggaagtctacttccgtagctttgtcttcgataccctcgctccttacttcgacaagtacaagggaatcaagttcaaggttgtgcgaatcgttgaaggttcgcacatccagcttgaagccattgacagcgatgtcaaggttgagggtctcgtccacgcagactatctgaaaagagcatgacccaggatatctacaagcaacttcgtgacctcgccggaaagatggatgtaaccatcatcactgccaaggctccgccccgttgggaaccggaccttcagggcggtgttcgtatcgtcgattacctcgacatcttgacgccttcggctggtcttcgacgtggcgagctgactgtgatcagtgcaaggacgtctgccggcaagtctttcttgtcggaggcttcctgtggcgctcgctaattacacgctgttccttgatgacgaacgtgagcctggcgacttcttcaagaacgtcgtgattgcccgaaactacgaagagttctgtgagttgattgatactcgcggaattccgaagtacatttcgttcgaccatgacctgggcgaaggcaagaacggaaaggattgtgctgccttcctggctcagcgattcttcgaccagcctgaggatgttgatgcgttccgatatggcgttcattcgatgaacccaatcggtgcagagaacatccgctccttcctcgaaagcatgaaaaggcatttcgcaaatgagtagcatcgaacagctcaatactgtcttggacaagatttctgtcaaagctcagtatgaaaaaatcggacaggacgaaggagttcgtgtcacgatcatgaacagcgacatttcgattgtgctcacctgggatgcgattgaagccctgagtcgttatgctgacaatcactggatggacaaggtgaagtccaagaagcgtttccgtaactccatggcatacgagttgagtcgtgcaggtgggaatgtcacctactgctatcactactcgaaacatcacatctaccgaatggcagaagccgactgggaaacactaccgggaatcatctgatgaacccaaccaaacaaatcgcgcttgagttggaacaggcacgtcgagaattccttgatgagccgtttactgccaagtggccagaaggccttgagcaggaacaaatctatcaactcgactgtgacgataagggtcgcagtggcgcgaattggttgaaggtctacaccgccggcgatggcgatgtgcatttgatgatgcaagactgggaagagtatcccgagtttcaacctgagttcatgccttcgctgcgttgtcgaacctatatcggtggaggtcggaattggcgtacccaccaggcattgctctggcttgcccaggcaattagactagacaacatagagaataggcgcaaccatgtttaagattttcaatggtacggtcaaccgtacacacttcggtgccttctacgggatcatggtgacccatgcttcgcagtggaacatcgacgaaggaactgacctcattcgttttgaggtttcggtactagatgacaaggctgacagtttccgagatcagctgtgtagactagtcccatgcgtagagttcgataaggagcctacggcttgggaaatgctaatcaattttttcaccaaaaagaaaggtaacgcctgtgaccaatgctgctgataatgctgtcgagtaccccgttctgaacgatccgaagatcctggccaaggtgaagggtgtctgtcaggacattagcaatgtgatgaccatgatcgaagcttcgcgctcgaccatcaaggctcacatcgacaacctggcggaagagatcgacattccgaagaagctgatccgacagatgagccgtacctatcatcgtcagaccttcgagaccgaagttcaagaaaaggacgctttcgagcagacctatggaaaagtcttcggcttcgacaacgactgagaacgaaatgttgcgcctcatcaacgagctttatgaggcgctcgatttcgatgctgagcactgtgactttggtcctgcctacggcatgtgggaaacgcgtcgtcgaaaggctatgcaggaagcacgtcgcctgttaaaatcaaaaaacttcaagcggagttgattatggctattctcgcagtgctcctcggtattgtcattgtcggtggcacgttcatcctgctcgccgatatcttcatcattcgtcctctcgagggatacagaagggatcggtggtacgaccggttcttcatgtaaagaactcctgtggtggttgggcacgagacccctagaaataggggttcttgtgtgataggctagtaagtgtctgattcttggtgccacacagatacgtaagtgtctgattcctaaggttgtcctgcacatagaaagaaactaatatgtggctgtaggcaataccaaccaaggaatgcagaaatgacggaagaaaagacgtatcgggttcgcagtcgtgtcctggctcttcctaaaggagccgacaaggcgaaacagctggagtatgcgctcaagcgacgtcgtcggcagaaaaagtcttggcctcagcctgaagatgcaatgctgattctccctctgcacttcaacgtctattcgttcagtcgtcagagcttccacgccgaagcctgcatggaaattccgaccaagaaaggtttcgagtatttcactgtcagcggtggcggcaggacacagttcgctgcactgaggcaggtcattgaaaagatcgaggcgtcagactggttccatcagatgaaggaacagaaagtctacttcaagatcactggcggcggtatggaggaaatctaccgaggttacctctgatctagtatcgtagttcatttgtagatgccaaccaagtctttaaaataacggatgtagtaaacacattcctgtggacattcgttatgacagaacagacaaagacaaagcgcaaatacaccaagaccttgaagtgggaagtgaacaacgagcaattctctgggttgacccaggcactcaatcgagtgaatgaactgctcaagactggtgcttcggaagacgtccgaatcaaacgcatcaagccagcaatcacgttctaaaggacacgggcgagagatcgccccttccttttgtcagaaattcaagctaggagttaatcatggcaactcacgttcgtattgattacgacgaatatcgttacgttacgcgtgccggatcaccggatgatcgctgggatcgcgacgatactgctgcagacatttccatcaacggcattgaaatcgtttctgaggcgcggtaccgcgaccttaccgttcccttcgatgtagacatcaacaagtcctacattctgctttgggcggattacaacaccggcgatagctttggacacgacagaaactacgtcga

SEQ ID NO: 10 - DNA, 200277 bp, unidentified
  misc_feature 1..200277: note = the genomic sequence of a bacteriophage
  source 1..200277: mol_type = unassigned DNA
ctcgacgtagtttctgtctcgagattccggtgagatagaaagattgttctttcgtaccacatctgtagactagtggtatgaagatcaagaccctcctcgcagccgcactgatgaccgtcgcactttctgggtgcggcgagatcatagaagaatcagaaatcattcctggcgcagaagctgagatggtagcgatgtgcaatgtgaatggaggctttgttcgcggatgggttacaccgatgaacaaatactcagcaggcaaggtttcgatcctcgaacagtacaggacagcctaccacgttgaatgtgtcaatggtgcgaagattgacaagctgttcgaaggcaagacaatcagataatatcaacccaagactaggagttagtcatggagtcagcaatttacaaggacctcgaccctgaggtggcagcagagtgcggctacttcgaaccgaaggaacccttcaatcaaatcttctcgcagccttgggcgcgagctgcgatcagcgcatacgaccagatcatctactacccgggcagtttcggaacgttccatgatggtcacgtctcagtgatcaagcgtgctctgcgaaagtaccccggcgcctggctcgtgatcgcaccgagcaattcagactacgcttcccagaagtacggcgcatggtcggaactcgcatcgaataagcatcgctacgacaccatcaagaaggtgttggataagcatggcatcactgcctcgatcgacattgatccgatgctcaacaaccgctgtgatcagaacttcactgaccagctggatgccttcctggctgcgggtaagcgcgccggcatctccgacatggccaagcctccggtcatcctgtgtggcaaggatcgtgcggacttccagaacctcaacaactacaccgacaaggttatcgtcgagtggtttgaggataccactgggctgagcacttccaagctcgagaacaagaagcggatgaagaagcatctcatcctgcgctgcgtgaacgaggaagagttcaatctgttctgcgagtatttcgaagaccagtacctcaccatccagccgtattacctgcacgatgaaatcgagtctgccaagaaggcagctgtgatgattggggcgacccacaccaactgcaaggaatacgctggcttcttgccttacatcaagatcagcaggcatttcaagaacccgctcgagaacggaaccgtgaacaattggttccttccgaatgacgcggttctgcttgactcggacatctttaccggaaccacgcaggcttgggtagagtctatgggcggaaagctccatggactgatcaatctcaaggactggcacggtgtctgggagctcctggatatcagcgacttccgaaagaaagaatgggcgtatccctttacggatatctccagccgctgtagcatgcaggcattcgatactgcctaccacgaccacttcaacgaattcaaggaaaagctcagccatgtccatccgtgaaatcatctcgccgaacgttaaggccatccttgctcttggcatcgaacgcgatacgccttttgagcttgatgctctcctgcacaagaatggtgtcatcgaaatcaacacgtcgctcgaccttctccccgaagtggatcgcgcgttcgagattttcgaccagcttggtgctgtgtatccggtctcggtgaccggcctggaaaacgtggaaagcggcgttggttcgcatcgcttctgcgcgtgggatggcgaattcgcggcgctcctgaccgaggtggtcaagctgatggagactcctgaactgatccagattggtgatcatctctgggagtttgagagcgtctcgaagtatttccgtttcatgcggtacgatcagggcggtgaacatttcccgcactacgacagcgatttcgttgtctacgatcatctgaaaaccttcggacagtcggttcgctacgccacgaagtattcgctggtgatgtacttcaacgactgcgagtcgggagaaatcgctttcatcgacaatgatccgaacccgacaaagggtgattggaatcgtcaggcgactgatgctgagatctccttgcgcatcaagccggcaaagggaaagatcgttctcttcccgcacactctctgccacactgtgctccccttcaccgataaggacagccagcgcttcatcgtgcgcggcgacctgatcttcacccaggcataagacatgactctcgtcccggtaaaccagaacgaactggaaatgtcggttcggatgttcaagcacatgttccgaaggaaggatccgtatcagaagattctcaccctgaagaactacttcttgaactggaacatcaagaaggttgtagtgggcgtctcgggcggcgttgattcggcactagttctcttcctcctggctcatatcccggacgtcgaagtccatgcagtgacgatcgatttcgacacctacagcgatgtctttgaccagggctatatcgagctcttgcagctggctacgacgcgcttccgaaacgtgaagtggcacaagaaagatctgactctggctttcagcgagatgatggttgccctggacctcgagaaaagttctgatgaagtcttcgccaacaccagctatgcgatgcgttacctgagcttcttcgccttcgcgcaagcactcggtggcgtgaccatcggaaccaccaacctggatgagatgggctacgtgggctggttcgggaagaactcggatatgatggtcgacatccagccgatttcgaccctgcacaagttcgaagtaatcgagtgggcaaggctgttgggcgtacctgagcgtgtcgctgcccgcattccgacaggtgacttggtcaacggtaccagtgatgaagaaaacttcggctgcacctatgacgaactttctttctacacgcaccaccgtctcaaagacccggacatggaagtttcgcccttcatggaagcgcatttcgaaggcgtagaaaggttgcgaaagaaaaatctgcacaaataccagggccagaagttcaacccagtcttcctgtaaagaaagatttctcctgtattatttgtagaacataaaccgaactgaggttcagatggaaatcgcgctctggctctgcttgatcccgatcacgtgggcggcaatagcacatttcgcattcaaaaggacgatcacctggaaagaaggtctgctccagggtggtggtatcgccctcgtagttctcctgatctacggttgcatggcatacagcaataccgccgatcacgaaatcctcaacggacaggtgacgggaaagaagcagacctggaccagctgttcgcactcgtattcgtgtaactgctacacgacttgcagtggcacaggttcaagtcgatcctgcacccgacattgcagcacatgctacgagcactccaacgactgggattgggacgtcttcacgacggtaggtaacatcgagatcgatcgtgttgaccgtcgtggtagccgtgaaccacctcgttggactgcggtacagatcggtgaacatgctgcggtgacgcacacctacaccaactatgtcaaggcagctccgagcagcttgttcaacgtcaagctggcggaaaccgaggcaaagtccaaggctgcgataatccctcagtacccacgcatctacgactactatcgcgttgaccacaccattgatatccaggcaggtgtcgcgaacagaaaagcctgggatgcagagctggacgaagtcctgaaaactatgggttcggcgcgacaagtgaacgtcgtgttggtcttcgtaggcaagcaaggtcgggagtacaaagacacgttggagcgtgcttggctcggcggcaagaagaatgatgtggtgattgtggcaggcgtcacaggaaccaagatcgactgggttgaagccttcacgtttggcaagtcctccggtaacggaatgctcgccgtcaagatgcgcgacgagttgcagaagtacggtaccactgaaaatgcgaaggaaggcgtggctgtaatcacaaaggtgatcgcatccgacttccatcgtaagaacatgaaagactacgaatacctgaaggctgagggtggaccatcggcaaagcaagtttcctggctggttggtattgtcctggtcctcttgatggtgacaactttccttcttcacaagtacgacgtgttcaacgaggagttctacgacaggcacccgaacattcgctacatccgaaatagttttcgtcgttaatccaaaatcacataaacccaacaaaggtaattgataatgaacattcgtggcaacaagggctcggcgtggattgcagtgctggtcttcctgggcatcctggcactgggcgcagtcttcgctgtaggcagctatgtcagcgcagccaactacggcaacgaagccgagcagcgcctggaagcgaagtggcaggacaatcagaacgtgctgggccagtacaccatcaagatcggtgaaatggcacaggtgccggaaatcgcgcgtgatgacctgaaggaagttctgaaggcaacgttcgaaggtcgctatggcagcgaaggcgtaagccgtggtgctggtgagcagaagaccttccagtggttgcaggaacagaatccgaatctgaacccggaactctacaaccgactccagcagacgatggaagctggtcgtaacgagttcaaggtctcccagacggaactgttggatgagaagcgcgcctatcagacgaacctgggctatgtctggaagggcttctggatgaagctggcaggctacccgaaggttgatctgtcgaagtacaaggttgtggtcggggctgacacggcacagaagttcgagaccggcgttgacactggcgtcaagctgcggtaataagtagaagtatccgacgaggcgctccggcgccttttcggttgatacgaaaccatacatcgttataatcagcaaaagaaaggagttttcttatgcagcatgatctcgcagttttcatcgggcgtttccagcctttccatctgggtcacctccacgctattgaggaaggcctcaagctcgccaagaaggttctcatcctgatcggtgacaccggtggtcctcgtggcctcaagaatccctggaccgcagaagagcggaagcagatgattctggattcgctaggcacctaccagcgcgaactcgtgatgtttgacattgcatacgacatgccgtccaacacggaatgggctggtcagattcagagcattgtcagcaacgcctcgaactggcataagctgcccagcgtaattctgatcggtcacgagaaggacgcgtcgagcttctatctcaagatgttcccgcagtggaagcacatcgacaccggcttcgaagaactggaaagcggacttctccgcaagtacaacgccaccgacattcgcaagatggtctggacgaacacgctgcattacgcaacgggtctcctgcatccgaccacgctgacctacctggtcaatcacatcaagcacaacccagctatctatgaagagtttctcgaggaatacggcgccatacaggcttatcgcaaggcgtgggcaggttcgccgttcccgccgatgttcgtcaccactgactgcgtggttatccagagtggccatattcttctgatcaagcgaggcgaccgacctggaaagggtctttgggcgttgcccggtggcttcctggatcagaccgagtccatccaggatggtgctctgcgtgaactgaaggaagagacgaacattcacctgcaggatgatgtgcttcgccgttgcattgttcgcactttcgtccatgatcgtgcaggcggtgtcagtgaagaagaccgtggcagaatcattacgcatgtgcatgtcgtcaagcttgccgacgggaagccactggccaaggtcaagggcggcgatgacgcagccgaagcacgctgggttccgttgggcgaaatcaactaccgtgagatcttctccgaccacggaaagatcattgaccgcgccctgagtggcgtctgaggaattatcatgaaggacattatcaacggctttttcgaagaagcagaacgtttgcaggctctggcagaagaacagcgcagcaaggctgctgcaatcctgacacctctgtttgatctccagcatcggcttgcatggtctgttcattgtgagcccgagttcaaagaactggaaaagtggtatcgcaagccgcgtgataagttcgcaaccaatgcgaaccgtcagcattcttactacactttcgacggaagtttctacgatctctgtgaatggagcgacggtgactcggctgactccattgagctgcatcctatcttcctgacagatgcttctgaggaagagaagaaggaagcaattcgtcaggtatatcgagcagatatcgctgccgtagaaaatcagaagcaacgcgcgaaagaagctgagctggaaaaggctcgcaagcttctcgctgaaaacggtgtgtctttctaaggcacactgttagactataatcacaccaaacgtagaaaggagttttctatgattttcaatccgatccttgcaacagacagctacaagttctcgcacttcatgcagtacccgaagggtaccactctcgtcaagagttatgtcacggcgcgtggcagcaagattcctggcgttaccgcagtggtttgtgctggtctgcaaatcttcattcacgaatatctcagcaagcgcgtgaccaagaatcacgtcgatcaggctgaggcattctgtgccaagcacggcgttcctttcaaccgcgaaggttgggacctgatcgtaaccgatcacaacggctaccttcctgtcgagattcgctcggttgaggaaggtacgcctgtgccgctcaacgagctgatgatttccgtgatcaacaccgacgagcgtttgccgtgggtgacctcgtatatcgagacgctcctgctgagctatgtctggtatgcctcgactgtggcaaccaagagccgcgaaatcaagaaggtcatcaagcagtacctggacctcacgtcggacaatgctgatgtggaacttccgttcaagctgcacgacttcggttaccgtggtgcaactcctggcgcagctcatgttggtgccttcgcgcacctgatcaacttcatgggtactgataccgtcgccggcatcgaagctgcaatggagtactacggttcggatgtctgtggttacagcatctcggcttcggagcattcgacgatgaccagttggggtcgcgatggtgagttcgatgcctaccgcaacatggttgactcctacgccaagcccggtgcgatcttcgcctgcgtgatcgacagctacgacaccttcgcagcaatcgatatgttctgtgaagaccgttgtgcaggtggctcgctcctggacatcgtcaagaaccgcggtgcaaccatcgtgctccgccctgatagcggtgacccgatccagatgccaattgacgtcatcaagtacctgatggaaaaggtcggctacgagatcaacaacaagggttacaaggtcctgccgagccatgttcgagtgattcagggcgatggcatcgatattgaagacgttgagcacatcctggagaccctggtcgaggatgaaaagatcagcgcctcgaacatcgcatttggcatgggtggcggactccttcagaaggtgaaccgtgatacgttcaagtttgctatgaaggcgtgcctggcatacatcaacggcgaaaaggtagacatcatcaaggatccggtcactgaccctggcaagaagtcgaaggcaggcgacctgagcgtctatcacaatccggaaactggagagtggaagaccatcactgaaggttcgctggattcgttcgctttcaacaagccttcgagcaattggtatcgcaaggactatgttgtctatagccactacggtcgcgatactttcttcgactatgtggacatggatactgttcgtaggaatgctgctctttaagggcagcttccttcataattactatggtgagatgaatgattctcaagagcgaaatcagaatgtccaaggctgaaattgaaagcctcatccttgatcacctgaaaaataacaacaagcacaatctcaagcttggtcgggtaagcttctctgttcgtgagtctgacgaccactatggtggctacactccagctgatcttgaaggtgcaactatttctgtggaactggagcttgacgatggaagagaggatcgaagataagattttggcttatctgcgtggcgaagttgactatgatgcacttcaactgctgcgtgatgcaagaaacgagatcgaaaaactgagagcacgtgctgttgatcttagctgggcagcggacgttgccaatgaccgtgcagatgctttcgatccgaggtacaactaatgtcactgaccaacctgttttcttcagggattgaataccggaagcgcgtcatggtgctggtcaccaagcgcatgctgaatccgaaacggggtggtggagtctctacgtttgtgcgaggcattgctaagtctatgcctgacgacacactcgtagagattcattgcgttggatcagataatcttgatgtctatgagattgatcatccgaatgtcgtgacttatggttatcctcagatggtgaagatcaaggcagaggagccaggcatcttccagcgcatcatgatcaacttcgatcagatcgaagaattccgccacgccttgaacaagtcggtgttcacggaagagaagctctatgatgcgattgtgactacctgtcctgagtctgcattggcttgcatttccttcggagcgatgatcgaaccattcaatgtcatctataccacgcatcacggcttgatgtctgacagcctgagcaaggttcctttcgatgacgctgtgatctacttcgccaacgaagtgattccgaagtctggatttgtcaccaccgtgactcagactcctctgaatgctgagtggctgcaggaaaagcatggtgtcaaggttgatcacgtgattcctctgctacctgacgagcttcctccttttgctgatatggcaggtaaggaaggcgcactgttcatcggcaagtacgagactggcaaacgacctgagctctttgtcgagatgtgcaagcagactggcatcaagggtaaggtcatgtgcggtggtatcaaagctcccgacgcatggcacaaggctttcaaggaagctggagttaccaactacgagatccgtcagaacctgcaaggcaaggaaaaggaagatttcatcgcatctgcgaagttcactttcgtttcctcacagaacgaatcgtacggttaccttgcactggaaggtctgttcaacggtcctaccatgattgcagacagccgatgggcgaagttctgggaaggctatggcgcaactctgtttaccaaaaagaacatggctgaggtggctaaccgtctcaatgagatgactctgtgggacaacaccaagctggtaaagatgctggatgatgctgagaacaagtgggttgacgtgatctgtaatcgaaagaattacaacaccaagcctaactcttcgatgctcaaatatgtgacgccggaatggcagactcttgctgacctagcaaaagcgcgcgatgttcgtagcctgtcgagcggagactacaagcctctcttcgaccactgcgagatcgtccatactgataatgaatcaaaggtgagacgtgtctgatatcactgtaggtgaaatgaagaagtggcttgagcaatttgctgatgacactacgctgacgttcgaaggaaacttcggaccaggcttgcctcaaattgatctgaccaacgatcaattccagtataactcatgggaggcctggtcttactcaccagccaggcagccctggacttatacgcctaccgaggaagctaagtcgagaggtaatacgactaagacctacccatatcatcctgcgaacatcacactcggtgaacaatcgtgaatgacggcaaagcagttacgcctcaagaattgaaagcgtggatgttcaagttcttcggtgatcactacggccttcttgagtgtaagaaggcccttgccatgaatgaaagaacgagtgacgctgtaaagtggctaatcaaatcagacctgtttcggatctgattcctagcatccctgtttacggatgaattaatcaattacaatccttgcatgaaaattgtccaatttaagaacggtaggtttggtgttcgccgaggatccttctgggattacggttggtggacacatcaattcctagattatgaaggtacctgggtaaagaagcagggatacaatatcggttcagtggaatgctattccaaggaagaagctgaaaggcgactcaaggattacattgaatcggaagcttcatatcaggcctttaaggcatctgcaaatgatatgggcaaaccggtaaagtgaagctacatcgtcacgactaatccagtgacgcaaattatatgatgaacaacaggttgtccaactagccgtcggctaagcgtagtcgcgacgtgagatagagtgggcagggcgagcaatcgtcggaagtgcgtaatgtgagaataaggaaccgagaggttctaaagtatgacctgctctgccacacggcaacaggtgttaggcaagttgattactaactgaattcttgtctatggcgtgaatcccgcaaagggaccaaagtgcaattatagggcgataccgttcacctcgtcctgctgggaagcagattgcaagtttgagtggtgatggtatggacgcagttcccttttctcatcgtcgcacttttggtggtaatagccaaagtgtggctccaataaaccgcaattcttttaaaaacatattttatgaatcaatttcgatatgcaggtataggatctcgtgatactcctgtctccttaaaacaaacgatgatggacatagcttacttcttagcgtatgaagctaatgctattctcgtatccggtggagctcgaggtgctgattcgttctttgaggaaggatgcgatcgtgcaggtggtaacaaagagatctggttgccagaagcaggcttcaatggaagcaagtctaagttgattggtgcatcgaaggatgcctatatcgtagccgagcgatatgttggtcattggaagaactgtaaggcatgggcacgagcagcacacgcacgaaactgtcatcaggttctcggtgccgatctcctcactcccgtttctttcgtagtgtgctggacacctggaggtgagagagttggtggcactgctacagcgatttctattgcagaagataagggcattccgattctcaaccttggatcgaaagactggtctgagacagaaatttctgattggctagaaatccggctaaattgacctttctaggtactgtctgtagactgtatggactaaggtgattaggagttagtcatgggttacggaacacgtccgaacgatttcggtggaaacatcagaactttccagcctgacaatacgaaagatgtgctgtacatcgacacgactttttcgtcggtcacgttgaaggagatcatggagaagatccgtgaacacttcggcagcgatgatatcgagaaattcgatatcgaggctcagtacatccacacggattgcctgggctacgactgttatgaccccggcgactactccagcttcatcgtcatcactcgcacaggaattctgtaatggctgctcgattcagtcgtcacgcgaagcctctctaccgtatcaaccagcacggtgagctctacaaggcgagtgaagaattcaagaccaccatccgtcgagccggagtctggaaccgccctgcatgtttccgttggtgggctgaaggatgccgagagatcaacacctgggtattcgattcccagggtcagcatcgtctcattgtcggatacgatcctgagactgacctgttgtatctcggacgcaccatgaccgaagaacgccacctccccaaccgttttaagaatcgagacatctgatgactgctctgctgattggctccaacgcacttcgcgcacacggcatcgctgttgagcgcaggaacctggacatggacttcattgctacgatggattctatcaaggcgatgatcgatcggaacaagacgcgcttcgtcaagattcagcacagcgaagatgcgaaccatctgttcatgttccctcgtaatgggaacgacgccatcttcgatatcgaaatcgcatggctcgattctgtcagtgataccctcattgacatcgtcctgaacaacggtctctacaagatgaccgaggagggctactacgccgtttctccgtcggttgtgctggcactcaagctgtcgcacaagtacaagaaaaactcgcgtcacttcctgaaaacgatgcgtgacattcagatgctcaagggacttggctacaaggttccgaagtgtctgagtgagtggctcaaggatcgcaagaagtggacctacgactataagcatcccaagttggaaggtggtgtgaccaaggctgacttcttcaaggacgatggcattcgctacgtctacgatcacgacagcatccatgaagctgtgcgtcatctgaaaaagcctgcctatcgctacttccagcctgacggtgaggaagtgggcacgtctaaggaagacttcttcgctcagccgcgtgaggtacagcttctggcagtcctcgaggaaagctatgtgctgagtctcgagcgcgccattgttccgttcaacttgaagactatcgagcagcggaagaaggcttttgacactgctctggaaaaggtctgcacgagcatcacgtctggttggttccggaagtttgcctgggataactttgacgaagtgaatgacctgtataatcaggaatatgtggaccgcttctggcgcgaagtcgaaagcggcaatgtgaagccctacgtgaaggaagaaaatgcttactgaaactgcaaaggcgtctatcatccaaaaggtcgaagagatcaaggcgctgatggatgaagcaaagctgatcgggcgcattgacgtctcaggtcgtgatgcttacccaggcgatttcgtgatcgacgagatccgcaccattgctccggcgggctctgagcactggtcgcacagttcgtgctgggatgatgaacctgccccgtacgatcctccctcctggaatgcgagtaactgctaatggctaaagacaatttccaagaacgagtagaactcatcaagctccttgtcaatgaactggataaggaactgactgacctcaatgtgaagcacaacgtcgattacaagatcgacctgcaagtccaagacgaggacggtaattatatcctcggcgcccaagaatccagcgactggaacgcgagttggtgctgatatgaaggacgcctggtttgaagttgtaatgggtgcttctggagcatcactgtatgtctctgatgaagatggcaccggtcatcgtctttctggaagtaagccctggggtggtggtcatacagcacatcgcttcaaggtgaacatcgaggaagcaattcgtgaactagaagccctgcgtgacagggaagaggaagaggaatgatcagtccgtgtgatggtggcggaagtgtcgacccgggtcgcgccaagtttgaggaagctgtcttccggcagtatttcatcaagcatgttggaagtgatctgaggatgaagccaggtatcgtcaacaaggctgagttctgcaagcgggacgaaaatggtaattacgtgcgcgaagaagtaagcgcaatgtggtttggttggaaactttatcagaaggaaaacgtgtaatgaccgtcgagaaagaacgtcatcagaagatcgccgcactcctggacagtgcttccaagcagcttgaagaggcacgccagttggcaggcaacgacacctatcactggtctggtcctacctatggtatgggtggctggatcgagtctggcgaatggcaggcatctagccattcttgctgaggaatgagaaatggaatacgctgattttgaaagccgtaagaagcgcatcgagcagttgattggtgaggctgagggcctgctcgaggaagctcgagaaatgtccgatggtctctttgatgaaggcgcaacgcgttcctggcaggcaaagccttcatttaggtttgaaggcccttcgtatggtatgggtgggtcgctgcaggatggcgaatggtttgcatcgagccaatcgtgctaaaaagagtgaaagggtgggacattggcacttcggtgcctttgtccttttaggtaaaccaaaggaatatcatatgcaacgtgacttcatcgaaacctggtctggcgtcaacctctacatgcctgacccggatccagaatccatcctaatcgaagacattgcgcacgctctgtctaaggtatgtcgtttcgccggtcatgtggatcgcttctactctgtagctgagcactccatccacgtctcctatgctgtaccaccggaacatgccctccaagcactgctgcatgatgcaactgaggcttacctgtgtgacattcctactccgttcaagcggatgattcctgcctatgcggaactggaagacaatctgtgggcagtgatcgctgaaaagtttggcgtgccgttcaaactgcacgagactgtcaagctggcggatcgaatgctgctcctgtcggaacgtgatgcactcaaggaacactccaagcgccaatggcctgcggaatacgagaaccatcgtcgttgggaaggcttctatgaaatgaacctgacccaggaacaaactgctcgtgtcttcctcaagcgatttgcagctcttcggtagagtaaatactgggaagtaaaccccaacatggaattgaaatgagtaccgaagaaaaagtgagtgtgctgcctctgccggaagatcctgcttacctccagtggctgcgaaaggaaggctttgaactcgaaagcactgtccctatggaatcagacagcattgtctgggttcgtaagacaaagtatggagtgccacgttgtttgatgaatggtgttgtccttgtcgagatcgtgaagaccggagaccagtttagcatgggcgttcgtgcctcggctaagaattactggggtgcggcttccatctacggcattgatgaagagaaccttgtcaggctgggacgccagtacgaacagcgagtggtggacgcatggcgggaattgagcgcctaagagaacagattgtcgattaccttatcgcgaataaggaggcaatcttgatgacgcagcagtctcagttctgtggaccttgtggtggcatgaaagtcaccacagtctaccgtaacccagattgtggacaaattggagtctggcttgatcaatacagacgagaaacgggcacttgagccccgagatcgagagtacatcattttcgttctagatggagcatacgctcatggtgaaagtctatctgagcacctgcatctattcgacgaatttgagatcactcgtgcacaacgaaacgaagttatcttagcatccgactttggtcaagatgaggatcttgtttcagcaatcactttatttgggtgacctatgtcttatacttttacggacggcttgaaagacgtcatcaacggtaatttttcaaacggtggtgagtccaatcgcaggtacgaaatgtgcaaggcttgcccattgttcaattctgtcgtgctcacatgtggttcttgcggatgcttcatgcctgcgaaaaccaaactcgttaacgcaacatgccctgagggcaaatggtaaaatgacctaccgagacacgtatttcttcgacctgtgccgtgaggctgggttcgacgtaaccgatccgcatgattgggtcgaaatgagcattttctctaaggaaatgctgatcgaagaatcggaagaagactgaggcttgttctttcacagtgaatctataaactatgatttgtgggcagtgtgccccgaggtgaaatgaatgttcaagtgtcctgtttgtggtgattactccaattcggctgcttcattggagtcgcacgctgcttggaagcacggtcgacgcattcgagctgaaaactatcgtgcgccatcgtatgatatgacaccgtcaagtactggtgacgcacttgttggtttggctgtaggatatgctttgtcatcgatgtttgattcatcgagtagcgattacagttcgtcatcgtcggattggtccggtggtggcggagactctggaggcggtggcgcttccggggactggtaacaagttgtaaagatatagtggtatgaagccaatcgaaaggttgcttggacgcgggttcgattcccgccaggtccaccaagaacacatttgatcgccttagcgggctttctctagtcagagcggatcgtccttcggtgtctgacaagatgggaagcgtgggcaagagtaagatgacgtgagcaccacggcaagtgtgttgttgatgggcctgcccaggtttcgacaggcaggtaattagaaacgagcagaccactgttgagagtatccactcaactgaataaagatgcaaactagctaaatgtcgctgctaacgacgccgattactccgtagctcgctacgcctaatcgctcagtcctcgcccctactgagttcctcattggggcccctaatttcattcttcgaaagattaaatacgaagaaaaggcacacgaacaatgactgataacgaacaaccaaagcagagaatcaatcctcgcatctacggatggttgtccgatatcatgacctgggtcggagtgctgttccttggtgtcatcctcggcagcgcaatcacgcagtcgattgccatcaaggaccgtgatctgttggtttcatcctacacccagacgatcgcaacaaaggatcagttgattgaatctttgtcggtgacaacggtgaaggctgctgacgtagctctcaatcagagtacgactgaggtaaccaaggcacttgatacaatgtctgagcgcgataagacgctgcgcgacattgagaagcgaattgaaacaaagcagcgccaagatgcagcaaagaaggctgctgaggagcgtaaactgcgaggtctcaaatgagaattctcgtcctgttgttagcacttgttctcgctggatgtaagcacgttcctttggatttgacggaaccgtgttatgtgccacaaaagaccaccgagtcggttgatgaagctgtaaggcttgccaatgaccgtcacgatgctcttgtggagtgtaatgcgaaactagaaaagatcagaacgatcttagacccaaaggccagtcaatgagttttgaaacgtacctgaaagaatcagcagcagctgaggaagcacacaaactgggattgtccgcagccggttatggcctttggcgcgacaagaccggtaaggtggtgaagaagaccgtagatgataaacttgtggacgttcgtggctctgaggcgaacctgaagcatcatcacatcaacattcctcagaaccgtgaaggcaaccatgcagagcacgatcagtcttcggacattgtctctgcacatgagacacctggaacattccgcgaaagcgaagtgaccaagtatcacatcaacgaacactctgcggtacatcctgacaaggctggagagctgcacaacgcattggttggtgcaggctataagcattctccttcagcgtttggtcagatgtatcaaaagggtaagacctcggtgatgatctccaaccgtccagagattagcgcaaagcgcggcggaaagaacgatcatcacagtgttctaattcgtaccgatcatgtggcaaagaagaagcctaagaagtaaacctttgaggatttgattatgagcaggctggaagattttgttatgccggtagggaccgaagagattctcttcattgatggcgagcatcgtgtggtaaagatgaccgtcattgatcgccgtgaagcaggtattaatctgttccacaattttcatatccgtatgttgcaggatgcacatttcatctatggtttgaaaaagaaagaggttctaaagtctcgttggggtcacatgacacctgatgaatcttttgaccttgctcagtcacttagcaggatcgcgctggacctcggtctggtagttggcaatggagtgagaatttaattatgtgcgttgtttcgatgattggtgactcgttccaggatcgttggaaggatcgtcttccgaatgattggaccattccggcaatgccgatgccttcgcagcctatggcacctccgttcaaggagcgccgcattgatgtatcgcatccgttccaggcgatcagtcgcgttgagtttgacctcctgaaaaaggaagtcgaaatcatgaaggaccttctggagcgtgctatcaagtacgacaaggacaacaatgagcctcattgcgagacggagagcaagatcgcattcctgaagcaagtggcaaaggctgttggcgttgaccttgaagaagtcttcggtaaataacaatgaagagcttttttgacgaacagggtagcttcaatgaggacgcccagcagttcacaaaagacgcgcaagagatcctaaggccactaatgcagaaatatgccggtgccggatttagctcgcgtgaaatagtttacctcatttcagatgtggcttcgattgaagagatctacatccgccaggtaaagagaatcagagataagcgtccttagatcagttggtagatcatctgctcgacacgcagaaggccacaggttcaagtcctgtaggacgcaccaagttttgccttagtagagaatggtatatcgggcttccttaaaagtcgccgtcattgtcggttcgagtccgacctaaggtaccaccttcataagcgcccaggggtgcagagagtttcgctagtatctcgctgcaacgacgtttattgaaggaacatgactagcacagaattcgcctcagtagagaattggtagatcggctccgctcaaaacggagtgtcattgtcggttcgagtccgacctgaggcaccaagatgacaaacgaagaaaagatcgctgcaaaggcagcagaagtagtacactacgaaggagtccttgaacgttacggttcgggtcgttggcttgacatgggtcgccgtcacctggctgaattgaacagggaacttcaagagttacgctctcaaagtattgatggtgatacgccgccctcgtaacgcggataagacagttcaagtctgtctgagagcaccaaaacctggctatgtgggtgagcggtttagccgacgtcctcataaggcgtttcacgtcagttcgaatctgaccatagccaccaattgaaacgagccctgttcattcagggcttttccttggctggtcaggtataagtccttgatactctattgttcatagtgggtgtcctgtattataaccactatagcttgtgggtaaataaaaaccccgtcatattgaggaagtcaggtgtaaggcatgggcagaaaagaaatcaacgtaacaaagagaaacggcaagcgtgagccgtatgacgtggcaaagattcagcgccagatcgaatacgcatgtgatgggattgctaatgtatcgcagtccatgattgaactctcgatgaacctcgagttgtttgatgggatcaagacatctgacattgatgagctggctatccgagcagccgtgaacctgatcctcagcgaagagggtcacaccaactaccaatacgttgcgggtcgtctggcatcatacgctctccgcaaggaagtctatggtcagtatgaagtgccttcgctgttctcgattgtgaagaagaacgtagccaagggcctctactcggatgaactgctgacctggtactcggaagatgagtggaacctcattgagacctttgttgaccacaccaaggatgaacgcttgtctcatgctgcaattcagcagttggtagacaagtatctggttcgcaatcgctccacaaaggaatacgttgagacacctcagattcgctacatcgtagctgcggcaacggcaatgcacgctgagcctgcaaagcagcgcatgaagcgaatcaacgaatactacaagcaggcttccaatggcgaattcaccctcccaactcctgtccttgccggtcttggcacaccaactaagcagttctcaagctgtgtcctacttcgttctgacgacactcttgactctatcttcgcaactggcgaaatggtggcaaagtattcggcaaagcgagctggcatcggtctggagatcggtcgtctgcgcccagccggtgcacctatccgcggaggcgagattgctcacacaggcttgaccctcttcatcaagaagtggttcagtgatatgcgtagctgctcgcagggcggcatccgcaattcgtctgcaacgctcacctacccgatctggcactacgagtttgaggaacttatcgttctgaagaacaaccagggtacagaagagaatcgtgttcgtcactttgactactcggttgtcacctgcaagtacctatggaatcgtttccgtaatcaggagatgatgaccttcttcgatccgaatgaagtgcctgacctgtacgaagcatactaccgtgatcaggctgagtttgttcgcctctacgagaagtatgagaagcaggatggactgcgcaagcgccagctcaatgcagcagatgccttcggtgcattcctcactgaacgctcagacaccggtcgcatcttcgaggtctacatcgacaacgtgattgatcagggtccggttgattctcagacatggcctatctatcagtcaaacctgtgtcaggaaatcttgctgcctacgcgtccgttccagcgtttggaagatgaagaaggtcgtatcgctctctgcactctgggttcgatcgtgctgggcaagttcaagaagcctcaggatatgcgcggcgcatgccgtactctggttcgcagcctcgacaacttgctgtcctatcagatcttcctgtcaccgcaggctgcgaatgcaaatgaagacttccgtcctctgggcattggcatcactgacctggcacactggcacgctcaacgtggctacacctacggtcagcctgaagcacttgctgagtttgcaaagtggatggagcacattcactactactgcatcgaggcttcgattgaactagccgaagagcgtggaccgtgtaaggaatggaagaacacttcgtatgcagaaggcattctgcctatcgacaagcgttcaccaaacctggatgaagtccacaagattgagttgactctggacttcgatgctctacgtgagcgtgttaaagtttcaggcatccgtaatggcctccttcaggcaacggctccagttgaaagctcgtcggttgtggttgattcgtcgaatggtatggctctgcctaaggcactgatctctaccaaggaatccaagggtagctcgctcgtacaggttgtcccggaatacgagaagctcaaggatcgctatgaaccacttctcatgtggaatcagcgagactgcgttggatacctgatgacggctgcactcaatcaggcgttcacagatcagtcactgagtacagacaccttctacaatcctgcgttctttgaaggcaacaagattccggcaacattggttgctaagaacatcatgaactaccatcgctggggcggaaagactttgtactacagtctgatgaacaagcgcggatcgaaggatggtctggaggaagtgaaggtagaaacagtcgttgaggaggtcattgcagatggagaagactgcccagcatgtactctctgagatcgattggtctacagtaagcattggatgtcctattccaggtggcgcacgcccctggactcaggaggaaagagataggcttcaagaggcgatgaaacagatcatcgcccgtgaggcagaaatgagagctcgtggagagattgaatgagtcagtttgatatcagtacagaaaccaactaccttgaccgcaagatgttcctggatggtactgttaccatgcagcgcttcgacaaggtgaagtatccgaagatccagcagtatgagaaagtccagcgcggattcttctgggtgcctgaggaaatcgacgtcaccaaggatcgtcaggacatgaaggctgcatctccggcaggtcgacatgccttcaccagcaacttgctgcgacagacgacgcttgacagtgaacaaggacgcgcaccgctgcagattttcggaccggttgtgtctctacctgaaatggaagccctcctgtctatctggggcttctttgagacaaacctgcactccaacagctacagccatatcatccgcggtgtctatccgaacccaggcgaaatctttgatcaggttcaccagaaccaggagatcattgatatggcagcaagcattggtcgctactacggacgccttgatgatttgaacgttcgtaaggcgcgcggtgagaatgtagacatcatcgagcacaagaaggcgatctggatggctctgcacgcatcctacgcgctggaagcaattcgcttcatggtgagctttgccacttccttcgcaatgatggagaacaagctcttcatcggcaacggtacgatcatcggaatgatcctgcaggacgagcttctgcataaggaatggactgcctacatcctgaatcaggtgtgcaaggaagatcctgaattcgcaatgatccgcgatgaaatggcggaagaagtctatgcgatgtatgaagaggtcatccaggaagaaaagaactgggctgtgtatctcttcaaggaaggtccaatcattggcctcaacgtgaagatcctccactacttcgtagactggactgctaaggaatgtctcgaggcggttggcatcaagtaccgtggtgaggctcctaagtcgcatccgattccgtggttcttgaagcatgtgaagcaggagacgaagcagactgctctgcaggaactggaatccaccgactacgtaatcggctcactgacgagcactattgactatggcgacctgcccgtactgtaagaaggaagcaacactcgagacgggtgaaacgatctacccacaccgacctgacctctacacgctctacttctgggcgtgtatgaagtgtaaggcgtgggtaggttgtcatggaacgtctcagatatcaatgggaagactggccaatgcatcttcccgtaagctaaagtccaaggcacatagcttcttcgatcccatctggaaaactggctacatgacacgcacacgcgcgtatgcttggcttcaaggaatgacagggctctcagcagatgactgtcacatgggaatgatggatgatgaaatgctgaggaaggtggcaaagatgtgcagacaatttttacttgaaacaggaattagaaacgatgtatgagatctactcgaaggacgcttgtccgaactgtgtcaccgctgcctcactcgcagagtcgaagggcattgaattcaaagtcttgaagttggacaaagactacacccgtgaagacctcttctcgaaggccccttcggctcgggctgttcctcaagtctttaaggatggtgtcctgattggtgatctggcggcgtttcgtcagcaccttgtaagtgtctgattcttggaaaactgacccgaactgactctatgagagtcagaaattgactcgttcttaacatctgcgccgtttggttcagattggactaagaacgggtcaatttcttgtcagagcctcgtgaagagagcctcagaacccttgatacctctagcaatgaaaaagaaatgaagattcaggttgtgccttaacgctaccttcattaacattcgattgtggtcagcgacagggctcagaaaggccagtcggactgatcgaggggttccaacatggggacaacatgaagacacagaaagacgcgatcaggcgcgagctgttagatcgtgcgacaggtaaaggtagagagccgacgtgggacttggacgtcgagccgaccaaactggaactggtcaaagcactcaacttctactcggcaatttcgacgccggagacactcaagaaatatgctattacgtgggcgagaaagaacgccccggaacgccttggggtcgtagaagcccaacccgatttcaagttccagacgttcggtgcgcttatgcgtattgaaagccgcggaatgaagcttccaaaggcagagaagaattcgattgcgaaatttgtgaacgaacttaatatgcctttcaccgaaccgaaacaaattaagccgaggaagaaaaagatgtcgaccgaaaacgtgaactaccgcaacttctgcgacgccctggacaaggccaccgaagcgacggagttcgtcaagcccgatctgaccgttgatccgaaacattcgacggcgtcggtgatcgaaacctgtcagcgcgagctggaagcgatcaaggaagacggcgacatctatccgaagcacatgacgcagtggttcacctacgtcatgaagctgatgaacggcggcaagctgccggaaaaggcgccgaaggaagtcaagaagcgggtcgaaactgtcgtgaacgacaactccgacgacggtgatgacgattcgactccgactcgtcaggcacgcgccccgcgcactccgaagaaggtcgcgtctgccaagggtcccaagaccccgactctcccgaagaacgatccggtgccggctgctgaccacgttctcaacggaaagaaggtcgctttcctcttcgacactcgctacggccgcctgacccggatggtctcggattcgaagaacggcttcgagatcaagggcaagaccatccacaacatcgaccactccaagtcgaaggtcgctctgctcaagaacttcggcgacgcgatgcagcccggcaagaacacgaccgacgaactggtcggctggatgagcaagtgcgtcaagaagggcaacccgatctcggtgggcagccgactggcagaagaagtcctggtcctggaagccgcctaaggcacaacggccctagggagaaatctctagggctttttcattggtcggagatcgtaatgagccgttgttcctgtaagaccacgacgcgcgaaatgacctactcggagttcgttgcctgggcacacgagtatgtcactgagagatttcttgtcggtggcctcaaggccatgcgcgacgcgatggaaatcgtcgtccagcagcagtccatgaaccattcattcaacaagggaagcttcccgaaggcggacaaatgagcatccgtagttggtggaagaaaaacgtcaccgaaccccgtcgtcggaagaagttcttcaaccttcgagctcggcatggctcgtccactcgataccacttcctgatggtcaaggaagccctcgaagatctcctgtaccgtttggattccaccggaactgtgtctcaccccgaagccggaatctgtttcaacgcaggcttccagattggcggggattggcgtgatgccggtgagaccttcctcagcctggcagaaatgttcaactctgaggttcgaggcctcaagaaaaagttcacgttcttcaccgacaatttcccgttcgaagacgtcgacgccctcgatgggttttctctgaacaagtgggttggtgagtccctgaaggtccggcgtgcctgtatcgaatggatcctcgacaacatcgagaagcatcaactgcaccggggttaaatatctcgacacatcaatcgagaacgaaacgtggccaaggtaccctacgacaaggcgaagaaaattctgaccactctgtaccaaacgggaggacaggtttctcgtgatccggtaggtcagaccacgccaccgaagggatcaaccgtaccgaagtccgtcatccaagcggcaacgccagaaaacaatctgagggtgacgaagcagccacgcaggaatgtgatcatcatcacacccttcatggcggaagatccggctttggcagagaagatgaagaggtacgctgctcgagcgactaaggactcgttgaataagaacgaagccccgctcgcatcacacctgttctactactcagtcttgaacgaaaaggatccgattgaacgagacattggcctccaatctcagctgagttggctcaaggttgcagacgtggtagccgtgtatgtagacttctccgtaacacctgcaatgaaagtggcgatcgacaacgctcgcctcctacagaaaaagatcgaattccgaacaattggagcagtggcatgattcgtgattacaccaacttcccgcaccgcgcaggcgatgtctatcgactgggtgagtcgaacctgtactacatcctgtccattgtcgaaggcgactcggtcaatgacgactggctcaagtatgccctgatcagcctcgacggcaaccgttggtgcgagcctatcgcacttgaccgttctaatgaactccctgctgacggtctgacggaagaagagttcaccgcccttgtcagcgcagaggaccgagaagctttcgtcaaggcttcgggcaggctggttttcgcctcgctccactgacagtccaattcggaccaatgctggccaatactagcatgtgaaggtcagcgtgaaatctgacagtctccgcagccctatgaccgtcagacttgttcagatttcaccgggtctgacgtaagtgtctgattctattggggttctggttgtgaaggggtaccacgtaagtgtctgattctattggggtcgtcacacatgaaggtagcgtttacagctcgtgacgggctgacaacgaaactttaacgagtctcttcacaagacccggagttctgatacagtgtctgacaatgatgtagagaggacgtgatcacctgtagcatgagtcttgtcctattccggactctgttgaggaaatatcatggctctttatgcaatcaagcacatccctaccaatcgcttctacactccaaacacctcgggtgctttccgcaccggacgcaactggagaaagggaaaaggtgtattgtttacggacaaggctgacgcggtgaatgaagtggtaagcctgatcaacaagcatcgtaacggtgaagagcagcttcgcattcgtacctatggcggatacgatgttgcacgcgccgaggatgcagttggtgatggatacattcgtgatcgcgatttcagcgtagttgacgtgaacgtttaagtttcctccgtgtggcgcactggccaaggatggccacctattctattccttgagaacacgatgacaattctttcgatcctcaatcaactggctgcgacttcgagccgcctggccaaagatgcaattctcaaggacaacgcgtccaatgagacgctcaagcgagtgttcaagctcgcatacgacaagaagatcctcttctggactcgtactatcccagatgaagccagctggtctgacgatcctcccttcatcaatcttgacggtgcactcgaccagatcgagaagaacatctgcacacgcaaattcacaggcaatgcagctgctggcttcctggcaagcatgttctcccagctcgatcgcgacgatgcaacggttctcaagcgagtcatcctgggtgacctgcgtgtcggcggaactcgcgaaacggcaaaccgttgctggcctggcctgatcgcaaagccttccttcatgctctgctcggcagactacgacgaagaagagatcggcttcccggcgatcagtcagaccaaggaagacggcgcccgttgtcgtctggaatgggatggcgagaccgcaaccctgaccagccgtgcagacaacgaaattacgcatcatgcgacgttcaacgattgggcgtcaaagcacctacagcccggcgatagcctagacggtgagctggtgtgtttccgtgacggtaagcgtttgagtcgtaaggactccaacggctttgtgaacaaggccatcaagggcaccatcagtcctgaggaagcagaaatgctgaccctggttgcatgggaccttgaagacaagactctgccctacaacgagcgtttcgccaaggtccagtctttcgaaggcaaggtgcaggcgatcgagtctcgtatcgtccattcgtatgaagaagctctggctcacttcaaggaagctcgtcgcgctggtctggaaggcaccatcctgaagaagtatgatgctctgtgggaaggcaagcgtgtcaagttccaggcaaagttcaaggctgagatcgaagcagaattccgtgtcgttggctttgactatggcaagaaggggaccaagaacgagaagcgagttggcgcactcaaggtccagtccgaatgcgggcaggttgcatgtgacgttggcatcttcaaggacttccctgacacgatccgcgatgacatgctgacggatctgccgaccatcatcactgtgcgatacaacgagcgcatcacgtctcgtggtcgcgatacgcagtctctgttcctgccgcgcatgatttcgattcgcctggacaagaacactgctgacaccctggatgacctgatcaagatcgaagcggcaactctggaatgattgagtcttccgtacagacaagagaaggcgatactatcggtttcgcctatgagattcgtcacggtgaggatttcgatcctcgctgtggcgtgtgtacccagtacacggaatacgtgaacaagattctcggcgagtggctgcctgaggcattcatcgttgaggcagattggttgaacacgaatagttcttccggtctcaacatgcgcaagatgttgatcatcaagagtggtcctgagccggtgctggaacgacttctgttctggctcacttccaactttgatgagactatcaaactcgcatcaattgattcgattgtgttccgtgaactaagcacacagaatgagtactcctataccattcagtattgacgctgtaacccatcaaccaatggagtcgtaatgagcattacctttgagcagtttgaaaagcagattgaacccatccacagcgcttattgtgccaagtacaatgagcttgctgttctgcgacgcgagttccagaagctggcaaatcagatcagcctcgacaatgtcgaagatgaagatgagcgcgatgacctgcatgaagaagtaagcgaccgtcttgccgacctgacctacgatttcgatctgcaatgggatggtttcgagcagggtaacatcaacttctgggttccgagtacttgctaatgaccactgaaaccaaaacctcttttgaagcgttccatgaacaagccacggacctctatagccgcctggccttgatcgatcagctgttcaaggaagctgatgctcttgtcaggaacgtcgatcgttcttcattcactgacgagcagctcgatgaagcctatgaattggctcatgaaattggatacgctgccggctggcagtttgacagtttcggtgaaaatggcggctactggcagccttcgacctgctaatcattcaaccaaaggaaatgacaatgagcaatcttgatcttgtgaacgccgccattgaagccggcaagcccctgtacgacgaatactacaagctgcgcaacgttgcagaccagaagctgcaggaaatcctgggtctggtagagtctctcaagctggaccctgaggacaaggatgatgaagaagagatcatcgagatcatcactgacctgggtagccgctttggtcatgcgtgggaaggtcattgggacgtcggcggtcaatgggacgttggtgacgaaatccagtactgggaaccgagcacctgctaatgagcaagaatgaagaattgatgaaggaactttatgagcggacaaaaccgctcaggaaagagtttgacacactcaagttcgctctggataagaagcgttatgagatcgcaggtctcatcaacactctcgaattcgaggagatctctgaggatgatgaagaagcttacgagtctctgattgacaacatcgacagcttcatgagctccttggacctgacttggactggcggacgctatttcgagtggggcgacaaggattggaacccaggtgaagaaattcactactgggaaccgagtaactgctgatgcacgtaatcaaggcacctgttcgtattcgcggtctaccgcagcgaccaactgtctttctggctgggtccattgatatgggctcagctgttgaatggcagactcgccttgaacgcgaactagaatacttcccaggcacgatctacaatcctcgtcgtgatgactgggacagttcgtggcagcagacagatagtgatcctcagttccgaagccaggttgattgggagcttgatttcatcgagcactccaaccatgttttcatgttcatctctaaggacagcaaggctccgatttctcttttggagtttggctacatcgttggtggtgaacagaacccggacaagctattcatctgtgtcgaggaaggcttctatcgccgcggcaacattgaagttgtctgtcgcagacaaggcatcaagctatacagtaacctcgacgaagcaatcgaggcattcaaaatcaaactggcaagtgatctatgactgaattgttctatccctcgaacctctctaagcctatgcctgtattccttggcggtagcactgcaaagggcgactggcagaagaaggttgtggctgcattcgaagacacgcatattcccttcatcaacaccagtcgccctgattgggacgtcgttgaaccgaaccgtgaacaaaagaacgaacacattgcgtgggaattcaattggcagaagcgagtgctcaatcacttcatctgcattccggcggatgcgaagtctcctacagtgatgctggaactgggacttgcgatttcgtgtcatggtaacgctgtggtgttcattgatccggagtattcgcatttccacaatgctcgtatcgcgtgtgagacctatggtgttcgtgtgttcaccgacttcgatgaagcggtagaaaagttaaaggacttgttcctaacttctcgcctattctgagaaaaacggcataaatactcatatgaaaacaattctcctcacatcgaaaaattggcatcaggttgcagctctagctgtcaagcccgccgacgaacgatatgtggctggatttgatttgaatactgggtacggaatgagttgaaagattgattttcaacttggctttctggacccaggaactgaaaagtttctgggtttttacttagtggtgcgaaaaggttgataagaaaggctgtccatgtagcatatggtttcaggacttttaaacattgacgcgccgaggagcttatgtgaaaaacttgtacttgacggtaacaaactttctgttaggctttggcacgttgcagccgttttgggcgacgagttacctactgatgaagttaggaaccgtttcaggaaacatgtaagaaaaggttgtgtagaaaacagtttgatgtaaactacgcaacatgaagtaacaggcgcgcagcaaagaagctgacgcgacgttctttaaaaacaaagattcaagttatacgtcgttagttcaattggcagaacaccagcctccaaagctgggtgttgagggttcgagtccttcacggcgtgccaagttttatgtctgggtagcaaaacggcaaatgcgctggcctgcaaagccatgaggtgcgagttcgattctcgcctcagactccaagttttatatctgtgtgtagctcagtctggttagagtactcgctttggaagcgagtggtcgttggttcgaatccaaccacgcagaccaagttttatcccgttgtatccccagacgctacgaacgtctacaaaggtaactggagtggcgccaaaaagcgctgatgcaggttcgaatcctgtcgacgggtccaaacagttctcggacttaaaccgagtggtggaggataaactgagaaatcagtgaatcccttgacgagatggagtcattaactcgatcgagaattttgggctgctcgtataatgagtattacacctgccttgcacgtagggaatcggagtttgattctccggcggtccaccaaaacttggggccttagctcagatgggagagcaggtgctttgcaagcatcaggtcatcggttcgatcccgataggctccaccaagtttagatatgccctgttggtggaattggtagacacgcatccttgaggtggatgtgctgaaaggcgtgagggttcgagccccttgcagggtaccaaacaagactgttcaatcagtcgaacgagttggaaggtcgggttcgaatcccgaagtgatgacgtccggattaggtcatcatttggtgtagtgggcagcacgccgatacattaaaaggttgcgcagaagtgtgcttcatttagactgtgaacacagtcaggcaagtcgatcaaaagacgcgccgacaagcccgaagcgagttcttcggctaagaaggaaagacatcgtttcctacttgtaacgacaagtccttagaggatgaagtctccgttagtcggacgcctgagagtggcgaaaaggattcttcggtatttcgggttgcaagcattaaggtgatgcaggaggcttttaaccttcagaacagggatcgttaccctggcgacccaccaagttttaagccccgttggctcaattggcagagcagctgttttgtaatcagcaggttgggagttcgagtctctcacggggcaccaaacaaaccgagaagtggtagttaacaactatcggcggcatcgggagaggatgacaagagcgacagtcctcaacgaattttgcgggtgtggtatagtggttgtgccctagccttccaagctagagagacgagttcgatcctcgttacccgctccaagttttacgatgcatctgtctgctaattggaataggcaacgatcctttcaagttcgggaatgcgggttcgagtcccgtcagatgctccaagttttgctccactcgtctagtggctaggatgacaccctttcaaggtgtagaagagggatcgaaaccctcgtggagtgccaaattatgcgcctatagcacaactggatagtgcatccgaattctagtcggatggttgtgggttcgaatcctactgggcgcgccaagtttcaaatggataggtgggcgagtggtttatgccagcagactgtaaatctgccgcttaattgcatcgttggttcgaatccaaccctatccaccaagtttatgtgtctgctgtcgggttggaggacggcaccgggctgtaaccccggatcctcaaaagggacgtagtaggttcgaatcctaccaggcacaccaagttatgtggttccttagctcagttggtagagcaacgcttttacaaggcgaaggtcgtgggttcaagtccctcaggaactaccaaacgttgaaacaggttgtgtagaaaacagcttggtatacaataagcaacatgaagcaacgtccagaccactgaagagtcgccgggacgataaacaaaggcacgaaacgtcgagaggcacaaaacattagcctcgtgagacgtctggtctagcaactcaattgtcgaaaggcgattgtttaggaatacggtacagtgatgtgcctaatggattaaacgcccacaagcggtccgccagagatggttcctctagaacaagtcgacatagtgcagccgaaaggttggcgtctagtatccctaggcgatatgtggaggctcagtgagacacgagattcaggtccaatgccgaatggtgaggatttgatcgtttagcgacggtagtgtttcggcttagcggcaactgactccaaggacattgaatcggcaggtacgtagttcaagccttagcgggtaagggcgagtatcaggtcaggcggactaatgttcgtactgtatcactcggacgtaggcttagcggctgaaacgagaggaggtcgggtaagaagctgtcgcccaaaaggctatggacttacgaacctgctcgaccttagtgggctttcaactttgacggttaatcaaaactacgaaaaacgcaaagtcaggttcggtcgtaagtgaaagtggcttaatcgttgacacgaaagtgaatcaacgcaatttgaggctcgcaaggctgatgattgtctatcaggaagtgcacctaagaggaagcccctctgaatggctcgcaaggtcaagggaaacgggaaggtagagtagcttacgatgacagaggaaacgccacctctttaaactaggcagccatgacggttaacaatgatgcatcgaaagatggttgttgtggaaaagttgggaagggctccgcaagagctgataatccaaacgaatgaatcgtctcgtcagactgtattctcaggtcgacactttgtttcaaggagttgtattcctcaaacgcttcaattgaagtttttgcgaaatgcaatttttggtcccatagtttacgattggttagaactcccgcctctcaagcggaagaatcgggttcgactcccgatgggactgccaagttttatacgcgtgtagctcagtggcgacgataagttcaaagacggtaggcataccgtcacgcagagcgagtcgaggattggcgatacgactgtgacgatacgaaggtggagctcgagatcctagctccgacaataacggtacggtcaacattcgagagcgccgggtagataacccggaggtcagtggttcgattccattttcgcgtaccatataagtagagtagtacaaaagttttatccgggtttagctcagtctggcagagcacgccgtttggggcggtgaggtcgtaggttcgaaccctgcaacccggaccaattagagaagtgttatggaaactttagaaacgaaagtgacacgtctaggcaatgggctttatggatgcaggatcatcaggtcagctgacaagaagccaattgttgaattaagagttgaaaagtctcagattaggaacgctatgtttgacatgctccgaactctagacaagctgggatatgatagtcctatggcacatgcttcgcgacatcgcggtaaggcttgtgtcacagactcgaaatatatctggcattgatttattctggacgcgcctaatggggaggcaccgggctgttaacccggcgatagaaatatccgacacggttcgattccgtggtccagagccaaatatggattacaggccaactggtgtaggcatgcagctgttaactgcagattgttgagttcgattctcaagtagtcctccaaaacaaacggtctattagtctatgggttaagatactggcctgtcacgccggtgtaacgagttcgagcctcgtatagaccgccatagttaaaacgagcatgggtctgctgggtgaagattttgcgttgtcagcgcaaagatgatgggttcgaaccccatatgctcgaccaaattaagaatgatgcgcggtcgtataacggcagtatactgggctcataacccggagatggaggttcgattcctccctgcgctaccaatcaacgggtccgaagctcaaatggcagagcaactggttcttacccagtaggaagtcggttcgatcccgaccggacccaccaaacaatggactcgttcccgtagttggtcgaacggagcggactcttaatccgacggcgaaagcccatcgcaggttcgaatcctgccgggtccaccaaaatgagatagatatgccgaagtacaatttcaagtgtagcgaatgtgagcaccgcggtgatgtctggaccggcgatactgaaaaggtcgacgtggactacaaagacgtagagtgccctggttgtggaaaaaagacctacaactatgctccttgggattcaggtgcttcatctcagtcatggggtcatgtgaagcctacaacactaggcagacagaaggctcctcaggattttagaaacttcctgacacagattaagaaggcacatccaggttcaacaatccgagatcattaatcgaaaaggtgttgtgatgtacgtgtatcaaacatattatgtgtacaccgagagattttgtcacccagacccacttgagtgggaagaaattcgtaaagtgatttgtactacgttggatgagagcttggcgcaagaagttgctgacgctcacaacaaggaacacaacaagatttcaggttacaaagactacgccaccgttgcatgttatgcgttggcaagtcgataaagaatcgccgttcagtagctcagttggtagagcgcccgccacgtagcgcgggaggtcgtgggttcgagacccacttgggcattaaggcgctagggcgaatttaaagtactcacatactagttcgagacagtatcgcccggatcctataattgtcagcaggtaatggtcatgcagaagaaaattgacgtgaaagcagtcgaggcgttcatgcagacgcagagccctgagacaaaagtttatcttggagcagactccgagaaggtaaaaatcaatggtaagatgtacgcggattacaccgttgtcatcgttgttcacattgatggttgcaagggttgtaaggtattcgccgagacaactcgtgaggaagactacgataaggatccttcaaagccgttcactcggatgatgaaggaagctgaaaaggtagccgagcttcacgatcgtttcaaagacaccttctacgacttcgaggttagtattcacctcgacatcaacccgaagaagacggcaggttcaagtatcgcaatggaagcggcacgtggttacgtcaaggcgatgaccatggttgatcctcacttgaagcctgtagcatttgctggttcttatgctgcggatcgcgctaaagaacttggtatgtgctaagagatatgcccctgtaggcgaattggtatagctactggccttagaagccagcgccgaaaggcattgacggttcgattccgtccaggggtaccaaatatgtcggagtagctcagttggtagagcggtagcttgaaaagttacgcgtcgcaggttcgattcctgtctccgataccaaaacaccgtcactcaggtccctcggtgcaaaataagggaatactcaggagaggagattgtagtatgaagttgccttcgcgttttcaaatcggtgataaggttctcgctggtcgtcttgatggcgggagcaaaggtgaagtaattggtgtacacttcaaccgatacaaagtatcgtatgatgtggtcgacgagttgacccaacgtacaaagaagcacctcagtgaacgggttcatcctgtcacagagtaaatacagatataagacaatttgcatcgttagctgagatggattagcgcttgcctgaagagctcgagaggttggttcgataccaacacgatgcaccaaacaaaggaacgtgaatgagctttaagccggttaatactttcgtcatcgtaaagcgtagggaagaagatacaacgagtcagggaggcatcatcatctctgggtcagttgatcataacctcttcactgttgtggccaagaatgatcttgtgacattcgttgagcccggtgatacggtagtaatcaacattcgcgaagcggctgaaatcgacgatgtacattacgcagttgatgcaaagcacatcttcaccaaggttgctaagtaagatagttttgcccaggtgacggaattggtatacgtactgtcctcagaaggcaggttttgagggttcgagtccctctctgggtaccaaagtttcagtgttccacgtgtcggaattggtagacgagccagactgtgaatctggagtttgcgggttcgagccccgtcgtggtccccaaagttgatcaggtgattcgccaccttagagtgcgaaattgaaatattgcctgttagctcagtggtagagcaatcgcccgataagcgataggtcgtcagttcgatcctgacacgggcaaccaataagccttcatagctcaaaggtagagcactcgcccgataagcgatagacctaggatcgttacctagtgaaggcaccaaaccgttgacgaaacagcgtaagggcgctaaagtagtacgcaacaaggtattctagttggagccttgcaaagagccggactgttaaaggttgcggcgagactagattggtagcttaattagcttacggtgcatcatatgttgctagggtatgatgactcagaagccttcgggaacccttaacttagctacaaattctatagcccagtcgtttagttggtccaagacgccgtcctttgaagtcggtcatcgtaggttcgaatcctacctgggttgccaagtttgatgcctcttagttcaatggtagaatgtcgctctctgaaagcgaagacaacggatcgataccgttagaggctgccaaatatgggactgtgccggatagctcccggacattatgatgttagtatgcagaatcaaagcactgtggacaggtaccgggacctttgtgatgattcttcagaacgttgattgatgcaggtcccgccagatgcaaaagtaagactagccgttcaagtcggtaagcacatggtgtgcaccatgccgcgttaggtgtggaggaggcgttcgaatcgtcggtggttgccaggcccctatagacactgcttgcaagagggatttaaagtaaccaaatgaggtcgctcctcgcggaacagttccctcggtactattctatgaaggttgtagctcaaaggtagagcgccgggtgtcggacccgggtcaaagagtatgaagttcgcgcgaactgtctgctcaggtgcaggagtcgaagcctgtcagccttcccactaattgataatgagagacgatgagacagttcaaccttcgtggtaagaagacatatcgtcctggctgtggttgttgcgttgttgaaaacttcaagccagaaatcattgacaagattcacgcatacgaaatgcgtaatccagatgaattcgctctcacagcagacgatttcgattgtgtagaagattttctcatttatattgatgttcccgttgaccaagtttgttatgatagttcacactgcgctcccttcaaaggcaaggaagaaagccaagaagaaggttgtaccgacaaggacgccagttaagaagttcgttgaaaagaaacgacagttcattcccaagatacccgtttaccgtgcagcaggaaccgagcacatccgatcacatggattggagaaggtgccgcctaaactggaacgtccaatcgtgtatcatggcgatatggctgaacgtgaagcggctgctcaagatcaaattgagtaccgtgagcatttggttagaaacgctttccgtaacgggaaggtatcggcatgctacatttcaggatgacctatgaatactgtgattgaaaagactgacaagggtgtgatcaaaggcgcagtgttcatcatcgccggcgataggcattgggttgagggtaatgtctacggcaaccccaacttcaaggatggcacctatatccacacgtccaagattgttgcagttcgtggacgccgcattgaaaccctgaactcgttctacacttgcgagttccacgttgatggacctgttcgcctatggtaacccaagttcgtattctgattgatgagtgtggtgcacctctggattccattgttgaagtgactgaaatcttggatgatggtcacatcatgtatacctgggaagacatcaccttcatggcttcaccggaagcctgggcattgcattatccggattctgcatatggatatgattctcagagcgctggcacagacatcaactacgagattttgagaaacgccgctgagcaattcttgacgtacgtcgaggaagaaatgatcgacgatgccgccattgattacttctacgacgtgttcaaggaaactctcggtaagtagaaatattggagcgtaactcagccaggtggctgacgctgtttgctaaacagttgggaccctatgaacgggtctggggatcgagacctctgcgctccgccaatttggatttgatcatgaaaatcgtgctgcttgatcttgagcaaactgtgatcgacgactgggagcacatgaacctgcttccaggaaacatcgataagattcgctgggcaattcagcacactggctgtaagctgggattgatgtcctgggctgtatggaatgaggtggacaaagagacgttcaagaagcgcctgcaaggtccactcgaagaagtgcttggtatgaagttctccgaagagcttatcttctctatgcacgacttctcagacatcatccttaagcgacgtcggaaatggcttagccgtgacgatatgtttgacctgtttggcaaggaagagtgtctactccagctgctgaggcttgaacacttcggaaagaatgctcacgttactctgatcgatgacgtggtcgatcacaacatggaattcaccaaaggcgctgctaaggtgcgtttcatcaatgtagatgatccaatgttcaagcattggaatatcaatgaaactgtccatgactatggcagttggagagaatgatggaagaacttgctcctcagaaaggcaatatgcctgacagcttcatcctcgttcgtacatctgcaggcgttcatgtgcttggtggttggagcggtggctatctctacggcgatagctggcgtctcagcactgcattgaagcgcgtggtagagttcgatggtgattgggtagttgttgaaacaagatcaggttcgacctatgtcctaccgacacaagcagccattcgccgttatactttgactgtgacgacttcgggcgtgttcaactcgttcgaccgtcaggcaaaggaacaaggaatcctctttgaagcgattccggaatccgaattcaacgatgtaatcaaccaactggaaaattgatcatgagcaatgctaagctgcaacgtctggaagaagagctgtatgaaaagctgcgtgagattcaggatgtcgctgtagagacgaacaccccgttctctttctccatcaactaccatacctatgatgtgttcctcccggatcatgaagatgaagacatggtagaatatctgaaggaagaagttggtgttgaagttggtgattgggtcagctctagcgatcgttgctaatgagcattgacactgacctctatgagttggtggaaggtagaccagacgcagcttccatgctcgtctgggctgcatcactgctcgggctaaacgccgttcctgattccgaagaagttgaagctgcaattggtatctttgaggatgctcgagagcatatcatcgagaaacgtgctaaggatcgtttgaccgatatcgttcgctacattgtcccttctcagtacgataaaaaatgggacaagcgcacgtcgaagcatcctgacattcctcgtaattggtggaatggtgctttcgtcaaatcgttcggatggaccaaagatagcttcattgtcgaagttagttcctacgtcggcaacaacgagtatgatggggcaacgattgagattcctcaacatctcgctgacgtaaagaacttcaattggaacctgcaagataagattcctcttattgacgcattcctaaaagcagccaaccgctaaatatcacgtaaggattgttaaccaaccggggagttggcaccgcttcgaaagcggtaggtgcccgaaagggcatggggatcgagacctcagcaatccgccaaacaatggacagtaaactagccggggagctagcgccgacttgaaatcggtaggcacgtaatggtgtggggatcgagacctctgctgtccgccaaacaaggaaagattatgagtcgtagtggaccgattgaagctgtagagtacagaggtgtcaagcctggtgatcgctgcattgtgatgaccacgtctactggacgttcgaagatgcacgcaggaacctaccttggtcaacgcaagggaaattgtgtcgtcgagcttgattatatcaagaccatctttgtgaatgctgaaggcaagcattacgattggaatgctgagtataagcaaaatccatatcccagagctcgttggaatactcccgagtatcatgcggaacaggaacgctacaacttgaagcagaaagagcttcgagctggttacgagtacaagaaggtcccgtctactcgtcgctcgactctgcagaacaacaatgtctatcctgcggatatggcactgaaagatttcaagctgtaaatagaacatatggacagtaatctggcttggtagtcagcaccgcttggaaagcggttggtaccgaaaggtatgggattcgatttctctgctgtccgccaaataaggcgaacgatgatttacgttgtatttgatgatacgtatcgcggtgcacacaaaccatttcattcaattgaggcaactcaagaggatgcagatagggtggtgcatgatttgagagaaacaagcacatcaacatgtgcaagaacactgatcaaatggaaggcatttgagtttggtcagacgtttgaactacctaagcccttatagcacagtggcagtgcacctcattggtaatgaggaggtcgtcggttcgatcccgactaagggcaccaaataaaggaaatggatatgactgatacgacaagcttcaccgctgttggcgaaggttaaaaatctgcgggtataattcagtctggtagaatgcttgcttgccatgcaagtcgtcgcgagttcgaatctcgctgcccgctccaagatgtcaaaagccagggctttaatcggtcctggctttttctttggttgaatagaaacagtctacctataggataaagcaatgaacagacacgacgtgaaagaccagctcgaagacctgtggttcgatgtgcgccattggttcaagaatctccgcctggaaatcgacacccgaatcaacccacgccagaagtggttgacgaaagaaatcggtcgccgtttcgtcgacaaagactacatcatcgagacgaccatcttcgaaagcatgatccacttctgggaagaggacgatggagaaaggtcgacccgctaccagttcgagcactacgaaggaccgtgtggtggcaaggcgctcaagcccgaagaccaagaagcctacgtatacctacgtaagctgtacgctgacctggacaagtgctaccgttgggctaagacgcgtaagggcttctgggcagactgctacaccaactacaagccggaaaacgagaaaaaactcgaagccgaagacacgtactatatgaacgaaatcatccgtctccgtaagcacatgtggacctaaatgtacggaatccctgaaaactaccggcgggtggcagaatctttctatcgcccgcatggttgcaccttagatttttctcaaaaggcattgctgcaagctttcgagaaagaaacctacggcgttgaccacgacatgtcgaagaacggctgggcttttggcaagaaagccttcgacatcactgtcgcaagttggcgcgaagatcttgcagaaggtcttttctgcaagtatgactacctccgagactatgaagaagattcgttcgagtatgatttcatctggaacgtgatcaagaatttttcttcggcaaggctgttcacttactgatcttgttctatccaggcatcctgcatatcataattgtgtagcacttatacacctttgaggaaatgataatgagcaacgaagtttgcgtgaagttcccggcgcacctggtgcagaccgtccacgacggctacctgtacgatcgtaattcgcgccagctgttctcgttcaagtctggcaagttgaagccgatcaagcaggtcggttgctaccaggcaaagaagtcgtacggtgaagatggttgggctgtctccgtcagtggtaagaagaagttcatggccaagaaggagctccagtctctgtatccgacggagtatcaggttccgtttgcatgagcttcgttatcctctactgggcaggtgtcatcgtcaccggtggtgcctgcattttcggactctaccagatttggaagacgaagacctacacgccaatcggtttcgagcatgatgcaccagcgacgctgggttctttccttctccggatcttcctggcaatgctcgccacctttgtaccaatcatcaatgcctcactcgccatcatgattgtattcttggcagcctacatcgcgatcgcggaaaagtttggtgacaggattctcaaagtccttcggagacctctgtgatagcagctttcatcatcttcatgcttttctatggcggtcctgccttgattgttggaattcccggattcctcaatgttcgggcgatgatcaaggacaaggtgttccgagactggatcgaccattacgaaaaacggacaactcgtggtgatgttctgggcagagcttcccttcttgttcttttgactttcctgccagttttcaacattggctttgcacttttcgttgtaatagggtggcttcacgctgcctggtacaaattcttcggtgaatggtcaaggacacctgtataatggaagcgattatctttctgattgtctacctcatttcgattccgtttcctgcctatatggcttggaaagaagttgatgaggtccgcacatcaaagcgaatcaaaggcatccataacttcttctatcgcgatgccacgcggtgggatttgatctggacaggcatatggtgtggctttgttgcgatgctgccactggtcaacactgcgctcaccattggtggagctttggtttggttctttgagaagctttgggcaaccaaattcattgcatggatgaaaactccgctatgagcatgaacacaattccaacggaactgatcgcggttccgaattacgatggctacttctggcatccgggcgaagagcagttgtactccctcaaggtgaccggaacgcttaagccgatgaagtatcatggtgcgagatatgtgccaaagctgtatcggcaaattcctgcatcgtattccgtatcgcgtgctggcaagaaatcaattctgaccaaggaaacgctgcggaaaatcacacaacagaaatacgaggtgccttatgaaagtcggagtcgcatctgatctccatctagattttgcggatatgaaccccgagttcttccagtggcgtggcgacctgctgcttctcgctggtgacctcggtgaggaagattatctgcggaagcatggtgctgagttcttcgatggcgtctccaagatggcggagcaggtcttcgtcatctcaggcaaccacgagttttacggctctgagctggatgtagcggaagaccacctggacgtctatctggagcagtggaagaacatcatcccgctccgaaatgaggtgaagtcgtttggtcaccttgacgtctttggtggcactctgtggactgattatcacggtagtcctatcgcggaaatggctgccttcatgggtttgaatgacttcaagcaaattcgcatcaagaaggcaggttaccgaaagatcactccgcgcgatatcctgatcgagcatatgaagggaaagaacaagctgctggacttccttgagaagcctagtggtggaatcaagttggtgatgacccatcatgcgccttcgatgcagtctgtgccgaaccgttttcgtgctgattacgatttgaacaaagcgtattgcaatcactttgatgcgctgatcgagtctttccctgatctcagttattgggttcacggtcatacgcacgattacatcaactatactatcggtcagacggaagtgatctgcaatccgcgcggctacccagctgagcgaccagcacatcttccgccatatcaaccaagggatattttgctatgaacatttttatggggtcctggtctgaccgtgaggatatgatcgcggatttctgccactatgatggcgaaggtcgcgagcgcgtcgaaaactatcttgatgacgctcagatcatccttgcatgttacgagagctctgggtacgaaggctccgctttcgtcctgttccgaaagtggggaaagtattacgaagtgaacggtagccactgttcctgctatggcctcgaaggacagttcgaacctgaggaaaccaccatcgaagccatcgcgcatcgtctggagcatgggaacttggggcgtgagtattcttacaccacgagtagctatactcagaatgttttcgcggatgaactggaagaagcaatcatgaggctggagaagatctaatgagcatcgttgaacaactcgctcacctctgcgtgtgggcaggcacggataactaccgttggaagatgaagcaggtcggctggaccggttggtccgtcgacggtctcaaggaaaagcctgccgccgaggaaggctacgagaaggagtaattatgggcggaaacgcttttgataaggcagaacgcctgacaccgcagttctacaaagatgtcgtagacgatatcaagtggctcctgcggaacatcatggggtatggctccggcttctctattccgcattctgtgcggaacaaggaaagctacggcgacgtcgatgttctggtggcaagctcgcagatgcaagctgcactcaaacagatgaagaacggcttcaatgtcgttggtgaaatctcaaatggttgcggctacaatctcctcgttcacactgatggacagtacgttcagatcgatttgaacaaaaccaaggatgaggacatggaatttgcgttccattacttctcttggaatgacctgggtaacctgattggacgtatcgcacatcgtcaaggtctgaaacatggtcacgacggtctgtggtatgtgcatcgtgatggtgaccatcagctgggtgagatcctgctgaccaaggactacgacactgcgctgtgtcatcttggctttgacgtcaacgatttccgtgcaggctttgattccttcgaacagatgtttgattgggtcgagcgttgcaagtatttcgagccgagcgcattccctcttgagcatcgtaaccatcaggctcgcgttcgtgatgcaaagaggaaggtgtacaacctgttccttgagcgactcgccttcgatggagactacgttccttcggacaaggaaaagcacctcgagcgccataaagacaaatggcctcacctgagaagcgagatcctcttcctgaattgtcagaatgctgttcgcaaggaagtcaaggctaagctcaacggtaacatcgttcgagagttgactggacttgatggaaaggagctaggtgagctgatgcagattgtgaagcggatgctacctgaggacaaggtatacagcatgttcccagctgagattgaggaagggatcatggaggcttttgaacgttacaaggtagagaagaatgcgactaattcttgattggactaatggcgagtatgatgacactcgcacctgggttgaaccggtagagtttgaatccaaggaagtcttctttgaaaagctcgaggctaagaagatcgagtacaaggaaaatcgtgacaagcagatctctgtccgtgagaaatatgtgcggaaagaaatcagctatgacgaatacttcgagcaactggacaagcttgactctgtgaatatcgtcgatgacaaggggcgcgagttcttccttggcgatatgatttacatgggtcactgggatccaatcactgtctacaccgttgatgaatggtacggagattgatatgaaagagaagtcgaaagataagctgaaatactacgctgtgtctgcaaagacggaatcgggtgatgactatctgttcctgctcaaggcaaagaatgctctggatgtagccaaccagttctcggtagctatggatgaagagctcggctacgtctactacaacgctgttgaagccgaagatcctgaggacgctaaggctgccaagaaggccatcaatcgtgcaatcgaaaatgcagagattgactgaggcactcaaagaatttgcctatgatatgctctatggtgttggatgcatcatagagcttctcatcgactgtgcaattggtatctgggaagactgcgtacgcaaagggtaaatactgtggatacatcacacaggacattttccaatgccactaagtttcttccccgatgccgttcctaccgcgatcggctgggcacatccactgaccggcgaacagctgacggcaggtgctattccagcatctcagcttgatggcgataccccggttgatttctacaagccaaatgccaaggccaagtctttccttgacccagctggttcaacacgtaacctgatcaaccatgttgctcacggaaagcgagttgagtttgcagttcactccctcgacaagattgcctcagtggcatggacgttcgggggtgcagctgttgctagcgtgaatgttaccgcaggtggttctggctataccagcgcgcctaccgtaacctttgcagcaccgcctgcaggaggtgtgcgtgctaccggtactgcggttctaactggagcagccgtcactggtgttacgatcacgaacccaggttctggctacactgctgcaccagcaattacgtttgcgggtggtgaaggtacaggtgctgcggctactgctgttcttgctgccaacgcagctgttacaggtggagctgtccagcagaaggtcttccctgcaggtactcacagtgtcaaggctgttgtttcgtatgtcggtggcaccccagccaacgtcacgttgaacacttcggtcaccgtagcctaatagaaagaacccgtagcggcgaaagcttctacgggtttttctttggtgttgtttcgtcattgatgttatatcatatagtcatgaacacattctttatttctgatacgcacttcacccacggaaatctgatgaagcattaccctaatgggcgtaatcgtttcgcagacgtggatgaactcgatgaacacatgatcaccgagtggaatgctcgcattggtcgaaaggaccgcgtgtatcacgttggtgacttcggcggatgggacattgaaaagtccaccaaggttcttcgtcgcctcaatggccagaagttcttggttccgggcaaccacgacaagaagcacatcaaggacgagaagttccgttctcagtggtcgatgatctatccctattcgtatgctgagatcagttgcgaaggtcagccgattgtgctgtgtcacttcccaatctgggaatggatgcagattcatcgaggctggtggcatattcatggacacgtccacggcaagccgactggtattcctggcaagattctcgacgttggagtcgatggccacaacctgttaccatggtcgtgggaagaagtagttgaacacatggcaaaccgcccaacaaggacacatcatgagcactgaaatcgaactgctgtttgaaaagcttgaccagatgggcatgcgcctgggtggtctcactctgggtgacaatcctgaaaatgctgagaaggtagctcgcgaactgcgactgagcctggaacgtcttgaggatgttggtctcgaagaaattaccgacttcgactgcacaggcgaaccgactcaggaaaagattgatcgtgaccggcgtgctcttgctcgtatgcagaagcgagctgacgacatcaaggccaagacccgcgatctcaagcgtgagctgggcgaggacctgatgaaatatgctgaagaaaatcttcgcccctattcctatggcaaggcaggcattgaagatgctgtagacaaaatcgtcaacactgccaacctcaatgattacgattatgaggaaggctatagtggtttctggcttccttccaacttcggctgctaaaggagaattaaatgccttactcgattcctatgtatgaaagtgaacgcggttggggttccaagattgatggctatgctggtccgtttccaacctacgaggaggccaaggatttcaagaaggcctacaatcgtaagtacaataacgaagcccgtgctcctgactactacatcatggcaatggatccggtagaaaccacaccgactatgaagcatgactaccgatcaactgtctgagcatgtcgtactagacaaagcttggttcaatcggttagttgagttcatcggtcctggcgccctcacctacatggcaagaaacatgcctgagggcgtcgttaccgtcccattggatattgatctatcgaaagttagatcatagtctaagcaactgtggacaccgactttctgattcctgtataatgctttggtagcacgattcattaaaagaaacttcaaatagaaagaaaaagtagaaggcatgaaaacaatcgaaaagcagtttagaaaactgtcagaggtggaacacgttctgcttcgtcctggtcggtacatcgggagcattacgtcccacacttctgtggaacattgtccgacttcgggaaagatggagcagcgtgagctgactttcaatcctggattcctcaagctgttcgacgaagttgtctctaactctgtcgatcattcgaagcgaccggaaggcaagaatctcgataccatcaaggttgatatcgatcactccaccggtgagatctctatctacgacaatggtggtattcctgtcatcaagcacaaggaatacaatcagtacgttcctgagatgatcttcgagcttcgttcgggtagcaacttcaatgatgctgacgagtcgatgctcactggtcagaatggtgaaggtgcagcactgacgaacatcttcagcaagaagttcactgttgagacttgtgacggcaagtacaagttcaagatggagttctcggacaactctcagactcgctcgacacctgtggttcgaccaggctcgggtggcttcacaaagatcacctatcagcctgactttgaaaagctgggcatgaagggtattgatgaagggaacattgcagttctcgtcaatcgtgtctatgaaattgcagctacgaattctcacctcaaggtgtatctcaatggtagtcgcatcacgttgaagtccttcaaggattacatcgagatgttcacacctgagtatgcctatgacgaaaacgaacactggaagatcggtattgccagtgctgaggatgggttcgctcatatctcgttcgtcaatggtactcgcacaaagactggtggtagccatatcgactatgtggccaatcagatttgtacggaacttcgtgctcatatcaagaagaagcacaagatcgatgtcaagccttcggagttgaagcagcacttccgactgttcattgatgctcagatcgtcaatcctcgctattcgtctcagacgaaggaagacctgatcactgaggtgaaggacttcaagactagctggaccattgatcagaagttcgtcaacaagatcatcaagtcgacgatcattcagtcggtgcttgattgggcggctgcaaaggctcatcaagaagagatgcgcgagctccgtaagctcaacaaggcaacggacaaggctaacctcaagcatattgcgaagttcaacgatgcgactgaaaagaagaatcgtcatttgacttcgctgttcctggctgagggtgattcggcagccggtcctctgcgcggcgctcgtaatccgaagctgcatggcatctttgctctgcgtggtcgaccaatcaacgtgtcggcagcacctctggcaaaggtcaaggagaacgatcagttcgagaatgcacgaattgtcgttgggttgaagtacggagaagctccggacttgaacaatctaaacttcggacgtatcattgtggcatcggacgctgaccagttcggtcactccattgctggtctggtagtaaacatgtactaccgactgtggccagaccttgtcaagaagggcaagatctatcgtctcgtcactcctgtggtcactgttgactacaagaagcaggatctcgaattcttctcgatggaggagtttgaggcatggcgtcttaagcatcagaacgagaaatacagctacaagttcttgaagggacttggctcttcgtctccgaagcagtggaagaagtacatggacaatctggatcgttatctggtgcagttcacgttcgacgactcggcaaaggaaacgatggacctctgtttcttgaaggaagctggtttcaccgacaaacgtaaggcatggttggatctggaatgagatttttcgaagacgatagcaattttgaaacgaccccggcgaatcagtcgggggtcaccaagctgcgagtgaaggacttcctcgatcgagacttcaaatcattctcggaatacgattgtcagatcaacattccgaacatgattgatggtttcaagatcagtcagcgcaaggcagcctatgtcatcaaccgaacgaacaaactcaacaccgttgagcgatattcggcacaggtggcatcggaaactgcataccatcatggtgcaggcaatctggaaggcgtcatcgttggtatggcgcagaacttcccgacctcgaacaatgtcaattggttcgttccagatggcacgttcggtaacatccttgaccacaaggcttcgtctggacgatacatctcggtcgaaggctcgcccaacttccgaaagtggttcagtaaggacgacgacctgatcctcgaatacgagtttgaggacggtgaacagattgagccgacgttcttcattcctaaggttccgacaattctgttcaatggttcgtcgggcattggtaccggttactcaagcacgattctgaactacaatcctgacgacgtcgtgcgcaatgtgctgcaggtcgtcaacggaaagaagcagaccaagctggttccttggtatcgtggttggactggtgatatctcgaaggctgatggacagacgactttccgtggcaagtttgagcgtgtcaacaccacgaccattctgatcactgagcttccggttggtgttgagcaggagaagtatcagtcgcacctgtcgaagcttattgataagggctggatcaaagactatgacgatgactcgacggaagaggctggttggaagatcactctctacacgactcgcgaatggctcaaggcacaaaccgacgaagacctgatggtcaagttgggtttgatctctcgtgagtctgagaacatcgttgtctgggatcacaagggcaagatcaagaccttcgacaatcctgagcagttggttgagtatttcgttgaggctcgtctggagttctacgagaagcgtcgtcagaagctgatcgaggcgacgtctgagaaaattcgttggctgagtgagcgcatgcgcttcattcttttctatctggacaactcggctaccttcaagaacttgaagaaggatgccttggtagatctgttgcagaaaaacaagtttgccgactacgatcgtctgttgcagatgcctatctggaacttgacgaaagataagatcgaagaactttcgaaggcaacggacaacgaaaagtctaccctggttgccctcgaaaaagatacggcgaaggacatgtacgttcgagagctgaaggaaatcaagtaggaacttgttctttctgcatcgaaacaatatcatagttttacggtaaccaaacaggactttgtgatgatgatcaggttggacggcgcgaaggttgcattgatctccgctgccgtcgctcgtgttgcaggtagtgaagcccacaagttcgtcattgacgagcatttgcgggcgatttcctctgccgttggcgccgaaggcgtctcggtgtatgacctgggcaagcggaacgaaaagactcgcttcattcgtttcgacttcccgcagggtgaacagatcgaaatcgaagtcggtccgcagcctgagttcgtgaaccatgacaatcgccccgaaggcgatgatgacaccccgggcggcacgcctgttgcgatgcggatggcagcatgatcgagatcatctttgggtgggcgcttcctgcgctcatccttctcatcgtaggtgggtacttcacctggaagaaagcgaaggaagacattctgtactacgactgtcttactcgcgggacgctgctgagaatcccgttggttcttatcgccgctgcgtttccgggcatcaactgggtggctatcctcttcatcgtagcctgggcactcgctgtgtatgaacgccaaatctctgacttcttcagagagcctgtctgcggaaggaagaaatgagcatctttctgttcgcactctgggcattcggaagtctcttctgtctcgcctacctgaccagcgtagctaaagaccacatcaagcactacgatttgacggttggcgacctgggcttcttcggagtgatgtgcttgttggcggtcatcccggtgtttaacttgctggcaggattcgttatctttgccgagtgggttgaggtcaccttcggacccaaggcaaagcgcatcgtcgatttcatctccaaccacccgatatgggacaaggtaatctttgtctcgaaagaatccaacaagaggtaataccgaaatggctgtgaaagaaaagaaggacaccaagacctacgttggtgcacgcatctccaccaagcagttcaagcgctacctggccactgctccgacgccggaagcgaagcgcgccatcaagtctctgtacctgagcgagccggtcaagttctacagcaaggctgacctggctgctgagaacgaaggtgtcgaaaccgacctgccggtcaaggcgaagtaagaaatggccatctccaagaagcgcatcgctttctggactgtggcactggccttcggggtagcaatttcgctacccccgggcgccaacgcagaacagccgacccagccgaagccggttccgtcgtatgtccaggccaacgtgaatcagttcaagttcacgcagattcctgatccgtcgaccaagggcgagacttcggtcatccgtttcgtcgactacgaactgcgcaaggtatgctacatccagaagatgtatgtctaccatggtggcggtccggcaatgagctgcctgccgctatgaagaagattcttctcgcagttgcgctgatgatgcctctgtctgcaatggcacagaacatcatcatggatacgaacactcagatgctgacccagtcgatgatggcgtctgcaaatgagccgagccgaccgaagccgacggcgcacaccttctacaaagagcgcgtgccaggcaagcccgaagaaggtttcatcccggtcacaagaaatgcacctgctgtaaactatgtgcaggataaggtaagggtcgaaggcaagacgatctacatgctggatgataggactaagggcatcaagtgctacttcatcacctatttcagcgtgcgtgaacctgcaatctcctgtgtgaagtactaactcaactctggaaaatatatcatgaaccgtgaacgtctgatctacatcgctgagtggctggaagctggcgctccgcataagggcaaagtgaagggcttcgacatttccgtcggtgtgcaggcgctcaagagcgatgcgccttcctgtggtaccacctgctgcattgccggtgcggctacgcagttcttcaacgacgaagatggcgagctggccaacgccgcttttggcttcagcgagtggcaggaagatgatgccaccaatgaagccgagtgggatgcggtcttctatgaagcgcaggacctgctggagctggatcataagaccgcagtcgaccttttcattccggtcggtgcaaccggtatctacgctgaaggcaccaactggtcggatttcaacgacccctacaagaccgcacgcgtcatccgcaatctgctggagaccggtaaggtcgactggagcatcgaataatgaaggcaactctgaccatcggtgtgtctgcctcgggcaagaccacctgggcgctgtctcagccgggtgaagtgctgagccgcgacaactaccgttggtccatcatggaagagaagggcatctcgccttcctggaccaactggaagtggaagtgggaaaatctggtcactgaacgcgttgatgccgacctggcactgtgcgcggctcagggtaaggatatcatcatcgccgatacgaacttgaacgagaacgttcgtggcgcgatggctgccaagctggaagctctgggttacaccgtcgaatacaagttcttcgatgtgacttgggatgaagctgttcgtcgcgacaacgagcgtgcgcatggtgtcggctattctgttctgcagaagcagcatcagcagttcctggacaaccatgttggtcgtctcgccgcagacgctgacaaggggactcgtaaggctgccatcgtcgacattgatggaaccgtggctctgatggaaggcgttcgtggaccgttcgagtggcacaaggtgcacctggacaagccgcatactccgatcatcgatatggtcaagggtctgatggcagctgggtacttcatcctgttcacctctggtcgcagtgatgagtgcttcgacctgaccgagaactggctgcagagcgtcttcgcccctgatggctactggcacggcgactgtcgtttgctgatgcgcgaagcttcggatcagcgtaaggacacgatcgtgaaggaagagatctacatgcgccatatccactacaactacgacgtgcagatcgttctggatgaccgtccgagcgtgtgccgtatgtggcgtgacctgggtctgaacgtcgtgcaggtcggcaatccctacatcgagttctaagatgacggacgccgaaatctataaggcggtaatggcggagctcaaggcagctccgttcattacaaccaatcatgcactcacgacaacgaaatttgcaacgttcaaattcaagaagcgttcgagtgggtactacctcaacgttgacttgcattcatggccttcggagcacgagcgagtacgcaaagaattcaactcatggctttataagaagctgaaaccctatggttgggttccctacaccacttccggtggctgtggcgagtggacctaccgacttgatggaggaatagaattttgacttcggaccttaaaatcgaatcaatcaaaaccgtttactctgctctgaacattcctttcccggaaggtcaggatactcacctatatggtgtgctgaatgatctctgggaaacggctactacgaccgttgacgtcgaagcagtaaggcagcagtcttggcaggaaggatatgatgacgcacgcgaagatcatgcgtgggacagttcaagctgttgattgacctatccaggtcaaagatgtagactgtgagtgtggtagcggtaacactttattattggagtacgtgatttagatggcacacgaaattactgaacgtgcagacggcacgagtgaaatggcgtttaccggtcctcgcagcgcagtttggcacggacttggtcagcaggttgatgaaaatgcttccttcgatgattggaagcgcatggcaggtttggattgggaagtacacgaatccaccgtcgattacaccgcagtgagtgcaaagggtaagcctgagaagcattcgattccggacaagcgagttctgttccgttcggacaacaaggaagctctgggtattgtctcgaatgacttcaagatcgtgcagcctgatcaggtcattgagttcttccgagaccttgttgaactgcatggcttcaaactgagtactgctggatcgctcttcggtggtcgtcgtttctgggcacttgcagatgttggcaagagcgagaacgttatcgacaaggatcagattgacggacatctactgctgacaacggctgtggatggaacgatgtcgacccaagcgcgtttcacctcaacccgagtggtttgcaacaacactctgacgattgctctgcaaggtgcaagctctcgccctgtaattcgtgtgactcataagaaggactttgatccgactcaggtcaagatcgatctcaagctcatcgacaagggctgggctgacttcatgaccaatatgcggaagctggcaaacaagaagatgtctgctcgtcagactcgagagttcttcgaagagcagctgtacaatccagaacgtcgtgcagacgaacagacctggggcgtgaaccgcgaagtgacgcgtttgaccgatctggctctgggtggtagtgggtccggttactccaagggcacggcgtacggtacgctgtgtgcgattacggagcactttacacacggttccggcaagcgtgatccatctcgacagttctgggatgcttatgtcggtcatggtgactcgaagaagcaagacatgtatcgcaatctgttgaaggttgcagcctaaggagaaagtagtgagcgaagtaaagaaagtatcggtgaagattggcattccgttcctgcctcttttggcaattttgttcatcgggcttaagatgagcggaattggtgtcgtcgcaggatggtcttggtggtgggtaacgtcgccgctgtgggttcctgtagcacttgtgctgggtatctggggtctgatcattggcctgggtgcaacggttgttgttggttcctatctctatcgtaaagccaaaggaaagaagtaatccatgaagaagttctttgtagcaattctgatggctgctgttctggccaccactggttgttctgtggtttcgcctgatcctggtcaggaagctgttctggtcgccaagccaatgatcttcggcaccggtggcgtgctggatgaaaccgtcaagcctggacgcgagtttgtggcattgaccacagatgcgatctatgtggacgtcactccgcagaacatccctgtgaacttcgacgacctgtctagcaaggacaacatccttctggacttcgagacgaacatccaactgcaggtcaggaacgcatctcagctctacaagaccaagggtcctgaatggttcaagaacaacatccaggctaactaccgagccattgttcgcgatgctgtcaagaccaaggacatgaatgagctgatgtctggccaaaagacggctcaggaagtcgatgccgacgtgactgagaagctggttgcactggtcaaggaaaagctgggtgacaacgttgtggtgatggatgtctctctgggacgtgctaagcccaacccggatgttctgcagcagatgaacctgacggctgccgagcagcagcgtgccaagacgatggtgcaggcagaattggctgaacaggctcgaaagcagcaacagattgctaaggcagacgcagacaacgcatatcgagacaagatgtttctttctccagagcagtaccttcgtctccagattgccaacatccaagccgatgcctgtaaggcaagcaagagctgtatcgtagcgccgcctggcacttcggtgctcgtgcagtaagaaaactttctgcaagtaggagaagccacagaaatgtggcttttcttgcgtcaatcgagaactttctggcctacgaaaaggttgttccagaagtgcctgatctgtagactgtgtgagtggtaaacagttccgaaaaacaaatcactccaagaggttccgaaatgtctgagtatgtcgtcgttccgcaggtcaagggtctttcgaaggtgccggcttatgttggcaaccgtgtcgatggctaccagactgtctacctgaccgtcggaaccaaggtgaccaacgtctcgaagttcccctatgaactgaagaagttctacggcacgatcgacggcgtggtccacgtcctctggaaggactcgatcaagcgcgctccgcgtgtcaagaagggagaagaatgaaccgctggtgcaggttcttcgccaccctcggtctcggtctggccattgcaggcggattgactggatgcttcgagcattcgccgccacaagaagccagctatacccagaacggcattcaggttgagaagctgttcgtcaaggacggatgcacggtttaccgattccttgacggcaacattcgctacgtctactacgcagactgctcgcattcagcgtcggtggcatacgaagagaattgcggcaagagctgcacccgacccgtcgtgaacacttcatccaaggaacagtgatgcgaacctaccataaagacggcacccaggcagcaccggacgagattttcgtcttcggcagtaacctcgccggtcggcatggtgcaggtgcagcaaaagccgccctacagcactacggtgcgaagtacggcgaaggcatcggcgagcagggtcggtcgtacgcaattccgaccaaggatgaacacatccagaccctgccgatcgaactgatcaagccgcacatcgacgaattcattcgtcaggctggtcacctcttcaacacccgaaagtatttcgttactcgaatcggttgtggcctcgcaggctataccgacgagcagatcgctcctctgttccgcgaagcgccgtacagcaatatgagcttcccggaagagtggaaaccctatctcgaggactgagaactgttatgcagaagttgatgcgcgaaggaatcatcattgacaccaagcgtcggcaggagggcaatctctccatccaggttccgcctgtgccgtcagctgaagaacgttacggtgactactgcgccaaactggcagcacgtggtttgaccccgaaggtaaacagcttcccctgggcgtggaagggcaagaagaagcccaagacgttcctcagcaagaagcctaagatgcgcaagcgtcgcatggagacggtaccggtatgaacaaagaagaaatcatccagaagttggggcgggcagctgcaattgatatcatcctgcagcgcgaactgaccgaagagcaactccagctcgttctcgaggttatcgaaatctcgatggacctggcggaggcgaataccctcaaggcagttgaactccggaacgcagcgcaatgatcgagcacaagaaagatatcttcttcaaaggcatcatgatctttgcggtcatggtgtgtcattctgaccaagagacatatactgaaggcatggtgcaccgcgacggttatatggctgcggctcggaagttctacgagcacttcggctacatgactgccaaggaaacccgtgacctgttcggcactgacactccggtctggcctgaatggatgacggaagttttcatggaagtggagcgccgagttttcgacaccaccatctgggacaagtgatgaaccagcaagaagctcttgagaaattgatcgacgccgctgaccatgcctacaaggtcttcctgagtctggcagatcgcggtgaatatccgcaggagcttctgccttgggacggcgaaggcaaagacagtccgttgttcatgggccaccaaggtctgatgttcttgatcaacgcgatcaaggatgctaaggctgtaaagcagcctcaggctttcgttgcagacatgaagacttccgccggcatggaatactatgtcatgttgggcacacctgagcggaacgattcgctcttcatgttcaagagtcgcagccgtgcagagttcaccgctgccgaagtcaactattcactgggcattggcccgcagcccgacgtactggattacgaagaatgagattcgatatcaccactcgccagccctacagctaccgaacccgaaaggtaggtttcttctgggatacctacgacatcgtctacgatgaaactgtgattcgcgaagtgaaagacgagagtcttgcgcgagaagtggtcgtgcttctcaactgtgcctatcgcgagggtcacatccaagctcagatggaggcgatggtcgatgcatattgatcttgacaagccgatgactgagctcaccgtacgagaatacgcctggctgttagcatggcaggctaagcaagtgacgggaatgcctacaggtgaaagggtgcggtggatggcagatgtggcgatcgcagacctggaagattctatcgaaaaagagatgaaataatggacacgaccttctatcaagaagctatcgacgcacttggcaacaccgagccggaaggcttcgatggttgctcaggcgttggtttcatcgacggttgtaagaggatgggctgccacaacgaagctgacgaggccaagttggttgccttccgaaaggcagcaatcgagcaaaaattcgtaggctgagaaagccaaacaccgctgtataatgcttcgacacactttgaaaaggtaattgatcatgacctacgccgcacaagctgctaccgaactgctggacgctctgcatcacgctcacctgctggaaactcgtcagcgagtttacgagtcgattgctgatctgcgctatgcagcacgccacgaagtcgaagtgatgctgccgactctgaaggctgagatcaagcgcatcggcaaggcgctggaagatgctcgcgagcgcgggctgaaccatggcgacgtgatctacgatgagctggttcgtaccatccgtgaagtgaaccacgctcgtgctcacaaccgtcagcgcatcaaggacctggcactggatcaggcaatcaacaaggctgctctggcagaactcaatcgtgagatttcctacttcgaggctgagggtctcgaactggaagtcgagcagatcatcaactaccactgaggaacaagacatgttcggatctcttctcaaggcagccgtaggcgttgccgtttcgcctatcaaggtagcagcagacgtcgtcaccctgggcggcgcgatcaccgaccgtcgtgagccgtacaccgtcactgctgttcgtgaagtcatggagaacctggaaaacgctaccaagccggatccgctgcggtgaccgcctctatctgggctagcaagccgcatcgcgaagacctctacgctgactgtctcgaccactggggtgcacctgcccagaccgatatgctcgtcgaggaacttgctgagctgatcgtcgcggtgcagaagtacaccaagcggaaggccacctacgacaacttcgatcacatggctgaggaaatggctgatgtgattttgatgatcgaagagatggcattccatttcaatcaggaaggtcacgcagaagcgaacaagccgtttaccgaaatggtcgcgggttggatggctttcaagtgcaatcgaactgagcagcgtctggcagaatccatcgcacgtcggtatccggaaatcgaatgaacgcactcatggtgacatatttcgtcgagaacggtatgggctacctctttgagcagccctccgagatcgctcgtcctttggcttgctcaatgacaggcaagccgatggcatggcctttcagggtggtcaagagctttgtccgagacgacgaatatgtccctgtgcttctgcaagaggcagcaaacgcatgatcaatcgatataagctcgacgtcctgctgacggatgaagaggaagacaagctctgggaaatgaagaagaacaacgacccgctttatggtcgtcgtatcagcgaatatttccatgtggttgaacacaatcggggaatgcagtttgccattgatcgtctcaacgaagcctacgccaacgactttgttgatgagtttggcattgacttcctggatggcagcgagtacgcgttcatcaccgacaaccatgacctggcatcggaactgattcgcatcctcgagctggacttcatctacgacttcaaggctgacgtcttcatctttgatatctgggcatgccacgaagcatggctgtcctatctgtacgagcgattcaagggtcgtgttcgcggaaacatgcgcgcgggtgatgtggcagaacggtatgtacgagaaggctatggcatctatcaatcgagccagtcttatcgtatcatgatcggcgagaatgttgctattccgtcgttcctgagccaattcaagagccgcttcctgagaatctgaaatgaaccttatccactgggctgaccaacacctcgactaccgatgctccttcatgccaacgatgctcaacatcaatggcgaaactgagactgttacagttcgactgaagagtcggcagttgtgtcaagggtcgagaatggtaaccattgtgcgagagtccggtgaggttattgaagtgtacctggatgcccttgagccgatgaccgaaagcctgtattattttgatacgcctgacggactatctggttcacttcttattccatttcctcaggaaaccgacgacggctgctaacggagaacactttgacaatttctgcaaaaatcattgccgactcgatcgacccgaacggtcgtcgaatcacaacctacgaactggaatacccacgcttcatccattcggagttcatgacccatcgtctgttctctcgcaatgctgcatcgagccgtgcaattccgatcgacaaggcaattcgtctgatcctggaagacaccgctgcaccgagccattggggcaagaatcagccaggcatgtctgcaaaggaagagcaagatgagcctatccagctgaccaagggaacgcgctattcgattagccgacttggcgcctggaattgggcacgtgaccgcgctgttgaagctgcgactgccttcgctgatgccaagtatcacaagcagatcatcaaccgtttgctcgaaccgttctctcacatcaaggtcgttgtgactgcaactgagtacgacaatttcttctggctgcgaaaccatgctgatgctcagcctgagatcaagattctcgctgagaagatgctcgaggctcgctcaaaatccttcccgaagctgctgcgcccaggagactggcacgttccttactacaaaggcggtcattggtttgcaagtggatatgctcgtggcaaggaactcgaggaagtcgatgacaagcgcggcggaagcactctgaaggaagcactggctatctcttcgtcttgctgtgctcaggtgtcgtatcgtgtgctggatgactcgcttgaaaaggctcaggacatcttccgtcgtctgattgatgcaaagccggttcatgcttcgccgtttgagcatcaggcaaccccgatgaaaactctgtacgatgagactgaaggtcctgtctacaactgggatgaaggtgtaactcacattgaccgctacaacaatggttggtcaggaaatttccgtggctggattcagcatcgccagctgatcgaagacaacgtctgttgggactatcatgagcatcagtagtggaactatcgtcgtagaaacacctgagtctatccgttgggaccgaaccatccgcaattggcgatggtggacagtcattccgatggtgttgcctgcagcactgatcatgttcgtcctctatccgctgcactatgttctgtggccaatcggacaatggatctgtaccctgtccaacaagctatactacttcaagcctccgaagtgggtcaagcgattaatggattgggcgatgaagaaatatccggaggaaacagatgaagagcattgaaggcaagtacactctacccaacggcgaagttcttgatgtgcatctgaacatcagcgttggagtcaacacctgggtcgatggcgcatggtgtggcttcaacgaagtgtctcccgaagacttcgcattctgcatggaagagatggcgaaggaaggaaagatcatttttgagcccaagcataatggaaatccagacagtaattgacgacatgaaagcaatggcatctaaatgggatgccattggcgcaggcttccaggcaattccgattcatacgtggatcggaatgcttgagcagtatcagaagaaacagaatccgcctgaacctcctaccgagcagaagattgatgactggcatctgcctatcgtaggttcggacacctgcctgactatcaaaggtcagagtcgttggttccgttgcacagctgacgattgcggtgcgaacgtcttctctaagacgcgtgatccgaattactatgtctgcaatggttgcaactctggctacgaaacgagcaagggactatgaaaaagattacttcacacaaggaagtcaggtgtaagactcctcaggaactgtctgacctgattgctagccttgctggctctgaatggtcactagcagcattcccttctacctttcttgatggcactgctcaagtttcactcgtgaagatcgatcttgttgaatacaagttctcagacaccgagatgctcgactggatggaacggaacgaggcggtctttagcagcacccacgacaacaccttcatggtttctatgcggctgcgcgaaagcaagaagtatggagctctagcgtgtggtctaactgctcgtgcagctatggagaaggccatgatcaacatcaaaggtcaccaataccttttcgaggatgagagatgatatatcaagatgcaagtggctttgttcatcaaactgcaagtatgaccgagctgctcaacctgcgtgaactgatcaatcttcggattgaagagaagcgcaatgaggacaggactcagatttggcgagcctatgacgatgcaatgaccattggttttgctacgaatgagcaactacctcagctcctgaaatggatctcagaacgtgctgagcatatctccgaaaagctcgttgttgagcagtatttctgtgtcaactctgaggttgaggattggcttggtagaggttggttcctctaatggcagtctacgtcgatagcatgagagcgcaatatggcagaatgatcatgtgtcacatgctagccgacactgatgaagagttgcatgccatggcagacgcgattggcgtgcaacgaaagtggcatcagaaagctggcaccgtccatagccactacgacattgctctttcgaagagagcattggcggtccagcacggcgctgtcgaggtagatcttcgtcaggttgcctatataatacgtggtaaacgccaacgcctaaaaggtgacacaccatgaagaagtttctgatcgcactgatgctggttctttcgttgggtggctgtgtgagccgcgaagagtacatcgcagaacaagaaagcaaaaccacgaacgaccagtgcctgcgaaatcagattttccagcagtgtctggcaaccattccgccgggaccgcagaagactgtctacaacgactggaacgaagttgtctcggagtgctcatctgttgcctactatcagtcgctccgtgttcgtagccaggtgaagccagaatgtcgagcacaatgagagacatccaatccgaagggcgcatcgagaaggcagcacgatacaagtgcgaacttctcggtcttgatccagatgaagcgctctggctcgaagatggtcggagcaagaaggaaaagcgttggatgcgagttgcgcgtgagatcgaaaacttccgactcaacctgcaaattgtatcaatgttccttggcgacgaagtgaccagtcctgtatcataagtaatgtagattcacatcgaggcatgttcaatgagtaagcgtttcgtttcaacaaaagaatacaaggagttggctccggttgcatatcgccagtggcgcgaccaaggcaactgtaatctgatccacggctacgcgctgtcgttctatttcgagttcgagtcggacaatctggactctcgtaactgggttgttgactacggcggtctgcgtccgctgaaggacttcctggaagagtacttcgaccactgctatctcctggcacaagatgagccgcactatgatgcgatcaagaagctgggtgacctggggctgatgaagatcaccgaagtcgaagcaactggctgcgaagcgattgcagacttcctttacaagtacatcaacaccggcttccttcgcgagatcggtgcacctgcagacgtttggtgtcgttgtgttcaagtccgtgagacggaaaagaacatggcgatgcgacttggtcatcaagaggacaacgaagacctgaccgtcgacctgtctaaatatcgcagagacggctgatcacggtgtaggcaatggcatcacaacccgcgcatccagagcaacgtaagatccttacgaagttctgtgaacaagaacttgtacgtcagcgggactatctgatcaagaagtataagctgagagactacaatcctcagcttttcttcaattggaaaaggaatgcagtccacagttggggcggatcactcgaggatgatataccattcctcatgctgatgcctcatgagatttggcagcacgtcggcaagacaggaaagtacatcttcaatgagtacgagttcctgcatgacaagcctggcatcggaatgggcagggcgaactggaagcagcacatctcatggactatggctcacgaattggctcacaccatttgtgagattgagcgcttcgcaaagaaagctaagaaagtcttcccgggacagactgcaactgagcatgatggtcatggacccttgtggcagtccgtctattatgatctccgtgtacatcactgccgcgaggaattctatcctgttgaggagatcgacttctcaaacgaggtccactactcgcatcacagggaaaagggtgagcaccgctttgtcttctacaaggggaacaagccattcgcatggtttgtccgcactgacggggtcttctggcagaccacgtcccgctggcggaaagcgggcagggccagaaacggggccagaacccctcgagaactgaccagaaatctccagaattcgtgactttttgtcctgagagttgtaagtgtctgattcgtaaggttgtcctcaggacagaaagaacttaatatgtggttgtgggacaaacactcctcaacaaacacaaaggacacgaagatgagcaagttgaccaagacccagaatgaagccgtcgccggtgccgtgaaggcagtcactggcttcaagatgggagcggagacttccggggtgcagcatgtggaagccggcaacatcaccagccgcagcggtcgtaagtggaagaccagcatcgccttcaccaacgacggcggcaagctcaaggcggacctgaccttctccgaagtcggcgccaagaccgagaccacctactccagcgagaacgctgccggcgagaagctgcgcgaattcatcaagtaccgtggtcgccgcctctgcctgaagggcgcggacatccagcgcatccttcgcttcttcaactccatcgtcccgaccggcgaagccgcgaagccggcgaccaagaagacgaccaaggctaccaaggctaccaagccgaaggctaccaccgaagccgtcgccgaaaccgccgaagcctgagccctacggggcggcgcaagtcgccccacctttcggagaacgaacaatgccccgtcgtatcagtctactcccgcagcaggcactggatttcgctcagctcccgatgatcgtctcaggcgatgacgagctggtcgagaaggctctcctggtaaagaagagcgatctacctggcgcctacgcatacgtcacagtcaccatggtgacgcgtgttgcggggaagaccgaggacatccgggtctgcgttcgtaaggaagtcgaataatgaagatcgtgatccaagtcctcgatggtggctggcaggaccagtccgaacatgacaccatcgaggacgcagagaagatgatggacgtggtacagggaggcgatcccgatgcctacgtccgtatggtgcagttcgttccgcgcttcttcgctgagtaccagaagcctctccagctgggcagtgacaggacctacacgcacattctctacgtagccgagtaccctgcggacaggagcatcaagtcctgcaaggcgcacttccggtctcaggttcgcaagttgcctgagttcaatgatccgacgttcaaaatccgtcacgagtacgtcaaccctctgtcgtattgaggtaacctggagatcgtcatgaacatcttcgtcacgcacctgagtccggttctagctgcacggaacttggacaacctgcgtctgaacaagatggtggtcgaaaccgcgcagttactctgcaccgcgcatcacatgaaacaaggcagccgggctaaggttctctacaagcccacgcacaagaatcacccctgcgccatctgggttcgccagagcaacggcaactacaattgggcatatcgtcacttcgcggctctggctgcagaatttgaaagccgcaacggcaaagtccacaagacctgggcagatttgaaggacgtgctcgagaacgccccgaagggcatcaaggacgtcgtccgcactccgttcccgaactgcacgccacacaaggacatggagctgatcgaagcctaccgcctgaccatgaccgagaagtggcaagcggatgtcgaagctggtcgcacgccaaagtggggtgagagattgacaccaccgttctgatcgaacgccaactagaaactttctaaaagcgccagagcgaaagcctggcgcttgacctatctatggtgcccgcatatcataacggtatggagacattattgtggttggcagttacattcttggggccacttgtactggccttcccgccagcattgaagaggctggtgaactactaccgttggtcgaaaactgtctatgttgaggacctgattggatatctcttccgaaccctttggccaactctgatcccggctattggatggttcgttatgccaggactctacttcgaagagttcgttgaaccgattctcaaaatcaagctcaagggttgatcatgtggccattcagtagtcgcaaggatgcacaaattcgttctcttcatctggacctggcaaagaaagaaggtgagttgtccaaagcactgaaatcacatctcgaaactctcgacaagtacgagaagggactcaactcccagatcgcgctgcttgaagtggtgagccggtggtccagacaactagaccgagataagagcatgagtgagactgatcaaggcttgttgaaagttgtactggaagatttctccaaggcaatatctgagcattgtcagcacaagaaatgggtcaagactgatcgacccgatccaatgttcccaggcgactggtatcaccagtgtgaagtctgtggcaaattcgactatgaggtctaaggaagaaatatgcgtaagctcgtaaccctgcgtactgtcgcagaaattgttcccatcgaaggcgcggatgccattgaagtggcggtcgtcgacggctggagctgtgtggtcaagaagggtgaattcaaggaaggcgataaggccatctatttcgagatcgattcgatcctgccatacggtgacgaacgttttgccttcttgatggcccgtggctgcaagatgcagccgactgaggatggtggtctgctcgaaggtcatcgcctgcgcactatcaagctgcgcggtcaggtgtctcagggtcttctgatcaagcccgacgatgctttctctgacccgactctctaccttcgtggtatcaatgtcgccgaaggtccgttccttgactaccggcattcggttgaaggcgaactgaagcgcatctacttcaacgacgaagagaacaatgacctgtcggatgtcttcggcgtcaagaagtatgagaagcctatcccggcacagctcgcaggaatgattgcaggcaactaccctgtgtggctgccgaaaacggatcaggatcgaattcagaactgcttcggtcgtgcgcctgaaggcaagtaccatgccgaagagaagttcgaaggttcctcaatgaccatctaccatgatggtgagaagcttggtgtgaccagccgaaacctggacctcaagctggaacaggaaggcaacaccttcatcgacgtcgccaaggcaagtggcatctttgatgcactcactgcgtggattgctcgcttcaatcaggatgacttcattcctcgcattgctattcgtggcgagctgatcggtcctggcgttcagggcaacatctatggactgacggcacatcgtttcatgatctacgatgtctttgctcatgaccattacctgacgcctctgggtcgacatgtcttcctggaagagttcatcaagccgttcgcaggaaagaatgtaggctatgtccatactctgttcacgatgactcgaggcgaatacgctacgaaggaatcgtacaaggagttcctgggcaaggcaacaggcaagagcattcttgcggacacgctgcgcgagggaatcgtctacaagtcagacatccagcaccgcggtgacgtgttctcgttcaaggcgatcagccctgaatacctgctgggcgaaaaagaatgaacgagtttgtcgcctctctgatccttggtgtcatcggctttgtagtcggtggcatcattggcactatctggttcacaggattctttcctgctgcactgattggtctaatcgtcgggttctgcatcttgtggtgcccgtgtatcctaatgcatctggactgaaaccatggctgatatctttcaaagggaagtgatcgattcgttccgcggcgaccacgaattcctctctaacttctatcgtgagatgatggaatacgatggacatgtttgggcgactgcggaacacgcctaccaagcatcgaaatgtgccaaacaggatgagtatgatctgttcctgaatcctatgctcactgcaggtcaagcaaagcgcatgggtaggcatgtggacatctggaagaactgggaagcaatcaaaattggcgtgatgcaaaagatcatcgaagccaagtttgaggcgggtacggcactggcagccaagttgctcgcgaccggagatgcaatcctcatcgaaggcaatacctggggtgacaaattctggggacagtgcgacggtgaaggtcacaatcatctcggtatgattctcatgtaccataggggcaatctcaggctggagccataatggaaagctatgaaattatcaggctaatcaataacgaacggcaaaggctctgggaagaggacagtgcaaatgaagtcactgaccaatccattgttggtcagattagaactgacctgctgacacgggaagagtttgataggaactgtgcgcgatatgctgattgggcatactacacgccaccggatcgattcgttttccactactatgaggatggcgttgaggaagctcgcatttgtgagcgcctgatgctaggaatagaacgatatgtagtgtctggcgtcaacggtggccactatggaatctacgacacccgtgatgtaacgttctatctgaaaacaggtacatggattgaaattccatcagacgtgttctttgctcaggcagacgttgatgcggctcagaagaaactcgacgaagcaaaacagcgactcaaggatttaaaatgattgctattccacacgatatcatcactcacaagacttcctggcgcgccgctatcgaactggcgattgcgaattccccaccgagggattatgatcaagacgatgctgggtattggcgccatgagctccagcgcttcgatgaagcctatgcccagctggaagcgatggacctagttcttctaccttaagacaaaacgccaactcaaggagtttgaaatggcaattgaagtgatcggcaaagacccagcgcagtatcgtgagacgacctgtaggaattgtgcttcgattcttcgtttcgttcttgctgacgtacagaagaagcaggtgagcgattacaccggcgatacagacactgtctattacgttccttgcccttgctgtagcaaccaagttagcacccgaggctactaatgagactactctgccgtctaggcattcacaaatggggacagtggtccaaccgttggtacaagaagtacatcatgcttgacccgtgggactttgaatggactgaatatcgagttcacagaagtctgaaatgttcagagtgtaatcatcagaaagataagtttgtcgagaccctgacagaagtagggtctgcgcttaaaggaacgaatcagcctacttgggactgattcgctgttcctagtgcggcagcaagttctgcctttgatgagtccaatgcggttgcgagcttctcgagcagctgtgtcagcatcgtgttttgaattcggagttgctgttctttggacagcagctcttttaccttttccaaacactggtctgcctcagcgccgatcttcataagctcagcttccatgtccgctttctccttgcgggcatcgtctctttgcttgatcaggtcctcgatcaagtttccttctgcacggtcacggaccaactctagcttatcgcgggcgaggcgacgcaagaacatcgtcgctccacctagcgcggctacgactgatccgccaatgattgcaggggtgattggttccattactttaggatcaggttgaggacaattctcttccaggcaggaaggtctttttcttcgtgccactgtctatggctaacgaggtcgccttttggaaatcctgtttcgatcaccgtatcaatgcgtcggttgatggcttcaattgagtttcttgcgtcatcaagacgcttctcgaagctttcgatcgacacctggacttcttgcacgatgataaggatctgagccagtaggctttcggatgcagcttggtccatggtagtctttaagggcggatgggtatcgcgatatttatagagaaactttactgaaccgttatatgcagaggtcgtgaaggaagtctataaatatcgaggatatcgaattgataaggatcgagccttgattaacctagaccaactctatgctcgcaccccggtcactactttcaccggcgccgagattatcgcggtccagaaggatggcgtgacgggtgcatctgttctgtcgacactgaagaactttctgaaaagcggatttgttgccaacgatgtgagtgatgcaacgactgtaggcaagcagttgatgaaggttgcatccgtttcagcggcaaagactctccttgaagtgcctgagccaactccggagccgttggctcctgtttcactgactgcaagcactacccttgcaaagacacacgccaatcgccgagtctttgtgaaagcagctgcaaccctcaccaccaatgcagctgtaatcgctgatactgacacgttcaccatctacaatcttcatacggctgcggtaacgctgactccgaagagtggtgaaactttccgcgtcaaaggcacaggatcagcatcgacctttagcattcctgcgaacacgagtgtgcgagttttcctaatcgacgccaccacttggttcatcgagaattgatagatggatgacctaatttctcttcccgtagtaacagatgacttcgacggacagacagctgccctcgaccaagccatccgtgaggctgcggttgcattcaatttcagctatttggcagacgctcctacatttgagcagctctaccatgttcctgatcttgtctacaaacttgtcgaacactacacgatgcgaggcttcatctgcacctacgatggtgaggcaggtaagctaaagattgcatgggatcacccaaatatgtcctggctcgaggcgagggaaattactcgtgcgatcccggaaatgatcccaaacctcggcattgcattccgtgctggtctgctctatctctgcatgaccaacggtaccgacctgcgcgccgaatccgacttcaccctgcagactaagctcggaaaggaaatcaaggctgctgctactctgggcaacctgcagctttccttcggcttcccatctgtgccagctccagctgttcagaacctctttgctcctaccttccaggttttggaagaccaaggctttgagatcacctacagcgcaaatgctaacatcttccttttgaagtggggcacaagcatggcattgaactttgtatctgggcaaacactcgaggttgtgctgtcttgaaaggtctcgtaatcggcaagccacactctggcaacgtctgcattaggtaccgtgaggatgcgtcttcgacggacttcctgccactgcaaccaaacccgtctgagccacctatcgtcattcctatcgaaggaactggcgatatgttccgtgcgatctacgacaaggatgctaacggtgtagttgacacagccgatgaagttcctgtctcacacattcctggccttcaggataccatcaacgacatctacaaccaaattggttcgggtggcggtggaggaggaaactcacaggtcatcttcgtaaccaacacaggtggcgagacgttcctacctggcatgcctgtctgtaaggtcggtagttcctacctgcgtgctcgctccactggtccaagacagacatgccttggccttgctgttgatgcgtcaaacccaggtgaacagctaaagattcagcaggcaggtctattcactctgtctcctgaaaattgggacttggttaccaatcaggttggtggccttggcacgacgatgttctattacgtgaacatggattcgcaattgaccatgactccgcctaccgacttccctgagtaccttgtaaaggtcggctacgccttaaataatactgacttcctgattgaccttgacttgtcaatcaaactataagagacggacatggcagacttcaaaccccttaagctaggctctaacaacgagctgactcgcttccagaccggagacagcgtcggcattgacgccggtggtaccggttctactactgcggctggcgcccgtacagcccttggccttgccatcggtacggatatccaggaacacagtgacaaacttgacacgctcgcagcactagctggcaccggattcctggttcaggacggcgcgaatggttggcttgcgcgtaccgtagcgacggcctctacaactcgactgactgttaccaatgcgaacggcgttgcaggcaatccaacgttcgacctcgccacagtcaccgacagtggtacaggtactttcaagaaggtaacggttgacggatacggacgcgtaactggcacttctaacgtaacgacagcagacatcacagcgctcgttgactcgacctatctgaagctgtcaggtggatcgctcacaggtttcctgacgctgcatgctgatcctacgaatgcgatgcacgcggtcaccaagcagtacgttgatactgtgatggcgtctggtggtattcctccgttcgctcctgcaaaggttcgtaccacagctaacatcaccctaagcggtgcacagacaatcgacggcgtttcggttgtcgcaggtgaccgtgttcttgttgcacaacagactactgcttcccagaacggtgtctatgtcgttgcggcaggtgcatggacacgcgcaacagacgcggatcagactgctgagttctctcctgcacgtcaggtatttgtccagcagggtacactctatggcttcaccacatggggcgttggtaacacgactgctcctgtcatcggcactgatgcaatcacattcgtgcaggttggtggtgctgctcaatacactgcaggtaacggtctcagcctcacaggtacgcagttctctgcggtgggcgtttcagggcagatcactgtcactggtagcggcattggccttgcaacttcaggtgcaacggctggtacctacaccaaggtaacggttgatacctacggtcgtgtcactgcaggcgcgacagctactccagccgacattggcgctcaggcttcttcgactaacctcaccgcgctgtctgcctacaacacaaacggcttccttgtacagtctgcggctggcacattcgttggtcgctcaattgctgtggcttcgactacacgtctgaccatcaccaatggtaacggcgtatctggtaacccaacacttgatctggctaccacaggcgttacagcaggtacctacaacagcgtgaccgttgacgtctatggtcgtgtcactgcaggtacttcgactgcttcggatcaggttgtaacctcgctgacaaacggcaacgcaggtgcgatcgtcattggtcgtgcagtctacatctccggcgccaacacatgtgatgtggcaaacgccaacaactatggcacggcaagcgtcattggtatcgcaacctcggtgacaaccgcatcaggtgcagcagtgaacgttgctgtttccggtgtcgtcactgcgacaactgctcagtgggatgtggtaacaggtcagtctggtggtttgaccacaggtgccaagtactacctctccaacacaacctcaggtgcattgaccacaactgctccagttacaggcatcctggctccggttggtatcgctgtgagctcaaccaagctggctctgcgcctcgagcgagttgttgttctctgatacacaatcaaacatcggttgatacggaagaggagcctagtgctccttttcctttgaataaatatcgctgtattacaggacagaataatggcctccatcaagcctctttatatcaatgcagcaggactcgaggctcaggcagcttcgggcgacacagtaccggttgattacggcggcaccggtctttcctctctgactgcaaacagctatcttcgtgcggtgtcaagctcagcctttgagctccgcacaccagcccaggttcttgctgacattggtgcgctgtctaccacaggcactgctgcttcggcgactatccttgcgactgcgcgtaccatcaacggaacgagcttcaacggctcagccaacatcacaacttcaacttggggtaccgctcgtaccttgacgattggctcgacaggaaagtcggtaaacggttctgccaacgtgtcttggaccctggctgagattggtgctgcaccaactgtccatacgcatgtatctgcagacattactgacctgcaggcacagctaagtggtcgagttcagcgcggcacgcttcagttgaatccggatggtacagcacctgccacattcttcaacgaagtatctgacactctcgcactcaaatattctaacaactctacaggttccacaggatacccaaccgagtttggtgcgaccctgtctgtgatcatggaaaagcagtcaacacgttcgtttgacctgcatatgccaaccaactcggctaataacctctacttccgaggctattcgtcggcaggtacaccaactgattggaagaccattggtgccttgcaaaacaccaacacctggactgcaaagcagacgttcgcaggtggagcgaatatggccaacgacgtactccttgagtacggttcgggcggtgcaacaatccgtggctcgtccactgggtcaatcatcctggcttcaggtgccgctgcgggtgcaggtattcgccttcgcccaaacggtgacactagcctcactggtcaggttgccattgacactgatggtatcgtagtagcaacaggattcagcggtccgttgactggcaatgctacaacggctaccacacttgctactgctcgcacaatcaacggcacatcctttaacggatcagctaacatcactaccgctaactggggtaccgctcgtactctaaccatcggtggcacaggtaagagtgtcaacggctctgccaacgtggcatggagcctggctgagattggtgctgcatctgctgatgacatgcttttgatcggtggcgacaaccaaatcggtaacggtaacttctacacaggcacagctacaggttggtcgggtggcagtggtagcatcggaagcggaactgctgttcgttctatcgttgatagcactcttgcgagtacgggtaaggcatatcgaatggatattgccaacttacctaccgcaggctacattgaaatcatctctaacaccaacgtcaagattgctcgtgttcagggcggcgaaagagctgtggttgcagcatacgctcgcggatcggcaggcgttcgtgtcttcctgcaaatccgttggaatgatgaaacaggtgcagctatctcctacactggtacacctaacaattcatcttacctaacgtctgagacctggacaaagtacacctacagtgctacggctcctactaatgctgtatctgcaaacctttatgtccgagtctacggcaacaccgcagctgatcaatggttcgagacgagccatatctcaatgcaggttggcaatgtaagcacaggatatgctccatccattgatgagctgcgcaacgatttcaacaacctgatcaccactccaaatgtctggaatcaattgcagacattcaacggaggctggaccctaccaaacaacaagatggggttgctaggcactggtggaggttcgatccgaggaactgacacaggtagcgttgtactgtcttcgggaacaggcggcagcggtttcatctacgttcgtcccaacggtgataccagcacctcattccagacagtgttctatgccacaggcaatgtggacatgccaaccgttcgtgcaggtgcatctactcctaatgccgctggagccgtgctacttgaattggtaacggaaagatcatggcagttccgtcagcgcaacacaggagcgacaactcagctagaattgtttgatattactggagctaaggactttgtcctgtccaacacatcaaacacgaacgtcattgtgatgaacccgacgaatagctcgatcagtgcaacgacgttcacaggcgcattgactggtaacgcgacaaccgcaacaactcttgcaactgctcgaaccatcaacggtacatcgttcaatggttcggcgaacatcactacatcgctttggggtactgctcgaaacatcacaattggttcgacaactaagagcgtcaacggttcggctaacgtgtcttggaccctggctgagattggtgcggtagacgcaaccggctttgtcaagaaggtcggcgacactatgagcggtgacctcactgtttctgcaaatgtcagtggtcagatggttcgtgcaggtttctctgccgaccttgcatttgctcaggtcagaacccttggcgacggttcaagtatcgtttggtgggaatccatcctgaagagctcaggcggtccaggaggtgagtcttggtaccgtgcaaagtctcacgtatggacgaacgatcagggtaacatcagtgctactctggacacatcaggcacctttaccgcatacaatgttcttgctgcaaaaagtttctctgtcacagattcaaccgcaacaagcttgatccaaggaaacctggctatcaacgatagcctaaacgccaggggcgtgatgtacttcggtggtaaggttgccaacaccggaaacaagctccgtatcctcaacccagattcttctacctctttacgaattgatgctgtgactgcagatgcgtctgcatttgcgcagatgaacttctatgcatctcagttcacattcatcgttggacgaatcggattcaacggtcaccttaactcgacagccactgcagctgttctttctgctcagaatggcggcacagtataccttcgccctaacggtgctgacagcgacactggtgcgacaatcatcggaaccaacggtgaaatgaatgtcagcggtagcatccgacttggaggtaacggtcgtaacattcgtttgtatgataacaacgcagacactgcttgcgttgacattggttcgggtattggtacaggcactgaccgtggcggatatatcatcaaccgaaacgctggtggtgaactatctctttgggctcgtaacggtggtgtccagctgcgcctcggtcttagagacggtgtcgcaggtgctgtagcacagctcaacgtccctatgctcttctctgcaccagctatggatcctggaaacgctgcaacctggtcgatcctaactacaggttcctacggtggcggtatcggtatgcgagacaatgcaggtagcggaaactacttcggtggcatgtatgtcggctccggtcagatgtacatcggttgtggtgcaccaaatgaggcaggtattcgtgcttcggttgtgatcaagaacgattaccaatggtacttcacaggtaacactatcaacatcgaaggttcctcgcctactatccgtgtctacgataacgatcaaggctacaccagctggatccaccacaacgacggtaaccatggattcctggcacacaacagcttctcctgggcatgtttccgtaactcagggaatgactggcagtgtcagaacaacatcatcgcctacgcatctgatagacgccttaagaagaacatcgttgatgcaccaaacgatatcatcgagcacttcttcgagaatgtccgcatccgacagttcgattgggatgaagagaagattgctcactataaggtaggcatcaaggcacgagttggtgaggtaggtgcagtggctcaggagatgcaggcagtctattctgatgctgttgcagtcaatgaggcgcacaaccagatcaagaccaaagacaaccctaatcctttgaagccagacttcttgaccattgactggacaaagactgttccgcttctgattgccgaagtacagaaccttcgccgcagagtagcacaattggagaaccgagcatgagctcacgagtaatcacagaagaaagcatcacccgtattcgcgagactgttgcacctaacatcacgattcaatgggatccagtaaccaatggaggacaggtaacgttcttcatgcaggatcagatcacagagaatggcgtctacaaaggcatgcaacctcatcaaggactgcgccctaaggagaactctcttgatatgaagggtgtgctcattgtgcctatggaagagatcatgaactcgaccattgtgacatcctcaggtgaaacgcctggttatgtgctgatggttcttatcaaggcatactttgagcaggtattcacggatcgtctcaacaatcaggacgctgcggatgcactcaagggcggtacaattcctgtcgaagagaaggcgagcctctaatgccaattccaggttcgggtgcaatctcatttgcagatctaagaaacgagtttggcggtggtaaccctgtaagaatctcagactacttccgcggcggtccgcgagttccaaacacaggaacaaacgcaggcgtaccaacaagtggaatcgtctatctgtcgcagtatcgaaatgcgagtgcatctacaccactgactgcatcggttccggatatctacgcatcgcgtctcccaaacggttcggctacacgttcaacaacagtgactgcatctggtggtacaggttcctacagcctcaccaatgctgttcttttgtcaggtagtgcaacagtttcccgaagtggcatgtctgtcaacgtgacagcatctgctaccaacgctgagagaaacggttcggttcgcgtaaccatttccgatggtgcaaccactatcactcgcgacttcaacttctacatgcaattcggtacgccgctctaagcctgtaaataatggacaacgtaatgatacattgcccggagtttacccaatgaagtttgccgcattccaaaacccagctgtttttgatcttctgaaccgcctattcgtggctcaggtgcctgtcaaggtcgcctacaagctcagcaagatccagaaggctgtgaccgttgagtcggaacgttaccaagacctgcgcatgaagatcgtgtccaagtttggtactaaggacgagaacggtgagctcatcgtcgacgaggcaggcaatgccaagatcgaggatgcagccctgaatgacctcatcgaagagatgaaggaactacacgacattgacgttacgctagagaacaagatcaagctcgatgacctcgagaaggttgacctctccgcaacggatctgtctatcctagaaatgttggacatcctagaagagtaaagatgcaaaagacaaaagttggtcgttatgtctggaatatgctgatcgccattgatcagtttttcaacacagtgtttggtggtgacccagatgaaacgatcagcagccgaattggcaagatcacagctaaccgcccgaagtcttgccaattctgtgtcttcctttgcaaggtattgaacaggatcgatcgtgaccactgtaacaaggtcattgaactcgaccgaggttggagagaggtaatcaagtgaccatgagcactgaaactgtagcaatcaagatgggtgcacctgcggatgtcgcacgagcactcgagaatgcctgcatcaagtttggcatcacaacccagaatcagaagtcgcacttcctcggacagatctttgttgagtcgggtggcttcaagacactacgcgagtcgctgaattactctgtcgaaggagtgatgaagacctttagccgtgctcgtatctctgaggctgacgctaagaagtacggacgcaccgcaacccaaaaggcgaaccaacaggcactcgccaacatcctttacggtggcatgtggggactcaacaacctcggcaattccaaggaaggtgatggttgggcgttcattggtcgtggcctcaagcagctcacaggtcgttccaactacacagcttgctcgcttgctctgtatggtgatgatcgccttgtaaagaatcctgctctacttgaacagcttcctgatgcagcactgtctgcaggttggttctggtcttcccgtggactcaactctctggctgagtctaactcgtatgaacaggtcactcgcaagatcaatggtggccttaacggatacgatgcacgcgttgcagcaacaaagaaggcatacgcgctcttcgaatccctaaagggctaagctatgtctcaagcaacacttcaagccgcaactctagctatcctcgcaggtggcgcatcctggacacagggcgcccttgcacgaaaggctgatggtctaccatgttccccgttcaatgaagatgcagttacatgggacatgatgggcgctctgatcaaggctcaactcgaatccgacgagcctaactggaccagctatcatttggtctacaacgcacttcgagatgctctgcctgccgactacaagagcagagacatcgaagcttataatgatgacgcagatgtcgtatggggcgacatttccgctttgttcgcctgattcaatcgaatcaactcaatccaacccagactcaaaattgaatattttagaaatattctgagcacaatacaaggttgtttggcgtaacatttctgttaccctaaacggcactgtaaaggagacagattatgaagaaatttgtaattttgtttctgctgctgatcacttcaactttttcaacattcaatacacacgcagccgaaacgatcatcatgcccgaagtaatcctggcacctgcgccagagattgtcgtggatacatccatcaaggtacacactttcgtacctgacctctcagagccagacatccttgtcgcagctctacccagtgaagcagagcttcgttgcctgcagaaaaatatctattacgaagcccgaggtcagggcaccagcggaatgacagcggtcgccaatgtgaccatgcaccgcactcaagacagtcgctatcccagcacagcctgcggcgtcgtcaaacagaaaagtagaggcacctgccaattctcttggttctgtgatggaaagaagagtggtggccctagccttcgacaggcagcagacgttcgagcatgggagctcgccggtgagattgcactaaaagcactcacaggcaccctgcgcgatatcgtcaacggtgcgactcacttccacaacacgtcaaccaatccaggctgggctcgaaagctcaaccgaacggcacgaatcggaaatcacattttctatcgttgacctgttagtctaatttggtaaccattcttcggagcgaaagatgcactaccacccgcagcctgataccgcagtgttcgtagttggagcccatactctttcgacaacactgcggtggctcggaaaagaggcaaccgttgacatcacaggtgagaaacttcaagacgtgatgcgacgagttgaccgcgcaactttctacaacaacggtgaagagaccgattgttctttctacgccgctctgtagactacgatcatccaaacaggaatttgaccatgtatctgcagttgtcagactttgaccacctccgcgaaaacccgaacgtgcgtttccgcgaagagaacgtcgccggtaaagatgtcgtcatcatctcttacatgctttccagcgacgagctgtggaagctgccgctcggtgtggaatgccgcggcatcaccttcgatgcccaaacgggtaagctgatctcgctgcctttcgagaagttcttcaacgtcaacgagaaagcgcacacccaggctcacatcatccgtgactacaaggtgcaggctgtcctggacaagcgcgacggttcgatgatcacgccgatctgggctgatggtcgtatctatctcaagaccaagaagaccttcacctccgacgtcgcagtggcagctcagcgctccctgtctgtcgagctggaacgcttctgtgaagccatgctcgaactgaacttcactccgatcttcgagttcaccgatcctgactgcaagatcgtcctcgactacggtcatgactctcagcttgtgctgctggctatgcgtgatatgatcgacggttcctatgtctcgtacaaggacctggaccagatctccaaggcttggggtgtgcaactggtcggcggctataacgctgactataccgttgatggctacctcgagctggcaaagattgccgagggcatcgaaggctgggtcatctacaccgatgaaggtcgcttcaaggtcaagacgaagtggtactgtgatcgccatcacctgatcgatattcgtgaacgcgatatcgctgccctggtgctcgaagagaagctggatgacctgatcccgaacctgctcgcaggcgatgcggatatggaagccatccgtgagatcgagcgccgggtgaccgatggtatttcccatatcatggaaaccgttgccttccttggtgtccacgcaagtggtatcgacctgggtaaggatcgtgccgattgggtcaacgccaactgtggcaagctgtcgaagtttgtccatcgtgctgctcgtggtgtggagaactctgacgagtccttcaaggagttctatcgtcagcactatctcagcacattctcactccgttcaatcggcaaccccaatttccgcgacgaggaagaataatgaagtacaccgttaccattctgttcaaaggcaatccgcagcccgtcatcctcaatgaggttgaagagttcactgtgaagtatgaaggtgataccatcaccaacctccaatggaagctggcaccaggacagaatatgctctacattgacctgagtcagatcgcattcgtgttcgcagtcgaggacaagtaagaccaaagttcctgcaaccacttcgtaccaaaacccctgagacccagagcccttgtaccccaaggttctctgggtttcctacgtaagtgtctgattcttggctccaaacagattagcaagtgtctgatctataagattgtcctgtcctacgaaagtctttaatatgtggttgtggggcaaacatacagcccgaaacgaaaagacaaaggaacgcagacatggccaagcacgtagaactgactccgagcaagacctacaagactccggaaaacgctcataaggcggtggagaagttgaacttgccggacttcgtcggtgaccgccagctgcgatacatcatcatgacgcacaccgacggtcgattctatccggtgttcctgggtgaaccggcgatgcaggcaggtgttcacttccacttctgtatcctgggttaaggagaagatcatgagtaagatgcgcatcctgagcggcaagaccttctacatcgaccgataccatgacgagcaggtcgagcgacacatcctggtcagcctcaacgcacgtgagcgcaaggccatcctgaagaacaggaagacccgctacaacttcatccgcaagctgcaggatgccggcatcgtagagcgcagtgggtgccagtgcggtcactgcatgaacggttgggactgctgcggcaggtggttcatgtcccgggcgaagatcattcctgcgccgacgggcgtctacatcgtcaagacttacgagaggaacatctgatgaagaccaagaccaggaacatcctgattggcttcgtagtagcactgaccatcggtgcactgtggatgacgaccccgaccgaatgcacgcacagcggttcggtccccaaatattgcgtggactaagatcatggaacacaacgcctggctgtataccaaagaccgtagcgagctcgaggacttcgccatcggcatgggcattgacccggagcagtactccctcgacgaatccctgattgatgcaatcatccagaagctggaggaacagaaatgagcaggcagtttgtcatcctcaccaagggcggtgagcaggtcgctgagatcgacaccaacaccttcgccaagatcatggctgggaaccgcggcgagatgcagctggttacgacgcccgcaggtcgtggtgtcagcgcctttgtggtcaatcagccgcacagcttccaaattggcggcacggggctgaccactttggacatttcgatcgcgctggatgcgggttatcgcatctaccgttccgaggatatcttctaatgaaggtcgagaacatcctcctgcaggaatacagcggcgaggctgtcaaggacatgccgaagatcctcaaggcacatcacttcatcatggacgcgaaaaacaacatgacggaacgcgccatggtgtatcgtgatgtggctcgccgagctctgggacacgacgtcccgatggacgtttccgatatcgaactgatcggaacctactaccaggagatgtgcaatgtcttcctccgtcaataaggtacgcctgaccaagtggcagcgcggtgaaatgtccttcttggtctccgtgatggaggagggcttcgacgacaacggcgacgtgatggaaggttacatcgcgcagggctacggctttgaccgtgctgaggaactgaccgacctggacaagaagctccgcttcaagcgccaggcaggctccttggaagtcgaactgaacatccgcgaagccaggaccatctggcacgaattcgacaaccgcctcgatatcgagctgagcaactcgtgcagctcgaatgatgaacatggtcgcgcctaccgcaagctcaaggatggtatggcgcgtttggaagcagttttcggcagtgacgtgaggaagaagcaatgaacccggaagatctcaagcgtatgatgttggccagggcaacgaatgcagcacatgcaatgtggggcgcaaagttctgggttgatcttccggaacaggagcgtgagaagcgactgaaaaagatcatggacatcctcggggagttctcctaatgctccgtcgtttcttcaatcgtcagaagcctgtcagcttcgaggcccctccgccgcagggtgatatgtatgagctctggctcaaggtcggcaaggtgcatatcaagtccgcatccttctgtcatcgagttgcggtgcagttgatgaacctgcgcggtgggaagtgggtggcccagcccgactaccacggcgtcttggtaggtgtctacaccttcactcaggacttcatcttcatccgtgtccgcgatgatggatatggcaacgagttgcagcggattgagatcagcatcactgaaggctcctacctccggatcccctgaaaactggcctacacatcgtcttaacgagtggtctatataatgcagatgccggcagaaactttctagtccggcaccaaccaaaaggatcatcgtcatgtctacgctcaactcccccgctcatacctacgccaagccctccggtgctgtcaactctgtccgcaagatgcatgtggagcgcggcggtgaggaagttcgcttcgtcatcggtaaggaccctgcaacaggtcgctactttccggtcttcatcgaccgcatcaagcaggtgagtgatcaggagatcatggccaacccgagcgccaaccaaacgggtcgcgcaaagaagcgagccagcgctcgaaaggctcctgcgaagaaggcagccaagaaggcgaccaagcggacaacgcgcaagaacacgttgcactgaaacgaaagtttctgagagaagctgcccgtaagaaggcagcttttcttttggctgtttttcgtgaccacacaagaaaggaattatctatacaatttgtatatcgacaaacggagcaccaatgtgaagttgttcaagaccgccatcgccaagctcaacgccatcccgagaaagaacatcgaacgtgtcgcggcagttgtcgtgttcactgcggtgaccgtcggtctggcacattccttcatcaatgatggtgggatggaattcttcaagccgaagaccgtcgcggtggctcaggttgatacctacgccaagccgatcgtcgaagagggtttcttcctgaccaagacgacctggcctgattacaaggacacggtgtcggctgagcagtatgcgaaccaatcgcagttcgatcgcacccacctgggtccgtgcagcaaggacaagccgtgcgagaagccgaagagctatctcgactataacctcccggactacctgaccaagtaaggaaacgagcatgaacccgatcgttgaaaacgcatacacctatcgcatccagaacgattctgagactgttgtctggaagtcccaggctcgtgatgaccgaaaggtagaagccatcaagtctttccgtgccgccaccggcgcaggtctcctggaagccaagcaggtagtagagcactacaaatctctctacgatcagaagatgcgcgaggttggttcgaagcctgccaatggcagccgtatcgtcaacctgcgtcctggcactcgtctcgtggtcgccgaagatgtgcctgggttcttcaaggtaaaggagatcaccgagcgcgacctcggcattgtggacgagtatgatctccttcagttcattgccgatacggcagcgcgcctgggcggaccggtggcgtaatgcctttcgtacttcaccaccgccgacaggccagccctctgcctatggtaaaagaatggtctgaggtcgccggctcctattctgaaaccatggaaggtgtcaaggctgagatggaatggtgggaccgttataatgagcaataccgactgacggattgggaattcaaagtggtgcaggtgaaggcgaggaagggatgatggaaaacgatttcggcattgactatcatctcaacatcatgaacaacgggcgcccaactccttcggactatctccctcctcgcccagagaaatgcctctggaggatcaccagctttgatggctactatgccacctaccgcaccgaatgcggacagctggaagatatccgtgccgaggaatgcgttggaatgccgatgatccctgagcctcaaggaaagtactgccatcattgcggtggcaggctgcatgtgaactcgtcgttcaaaaggaagacacactgatgaagttctacatcgtgggtggcgcagtccgagatttcgtgctgggcaagcacccgaaagacatcgactacgttgtggttggtgccacccccgaagacatgctgggaatggggctgaaacaagtcggcgccgacttccctgtcttcatcgacgatgagggtaccgaggtcgctctggctcgtaccgaacgaaagacaggcgtcggctacaacggcttcaccactgaccacagcaagactgtgactttggaagaggatctgtctcgccgtgacctgacgatcaatgccatggcaatggatcgggttaccaatcagatcatcgatcctttcaatggtgagaaggatatcgaggctcgcctgctgcgccatgtctctcctgcctttgcagaagatcctgtgcgtgtgctgcgaatcgctcgtttccgagccaggttcggcggagagtggacaatcgcggatgacaccatgtcgctgatgcaggctatggtacgccgcggcgatatggctcacctgacgaaagaacgtgtgctgttggaaatggacaaggcattcagtgagccttatcctgagctgttcttcaccacgttgcaagagattggcgccttgaaggttgtcttccctgagctggtgctggttgatcacctggactatctggagatcagaaaggcagctggtgcttcgcctgcctacatctatgccgttgtcgccttgtgcatgtctgaaaagaatgcgctgcactttgaagcgcggatgagagtgtgcagtgattggcgccgaatggcacgaatgtatcgcatcatgatgagctgccgtatggacagcaatcaggtcgacattctgtacaagatggacgcctacaggcagcctgagttgtgggaggagttgataaggaacatggccaaggttggaaggactcgtgagagattcttcaacgacctgttcgttgtctggtccgccactcatggcatgggcttcatgaacctgaccgaagaacagcgcaacacgctcaaaggtccggaaattgctgaggctatcaaacagctgcgcaagaaggtgatcaatgaaactcggtgacctgctcaacgacaatcagctattggatctcatacggcacatccgcgccgtgcatgatgaaaccaatggacctaagaataagcttgcgcgagaactaaagcaagtgctgtccgaattcgagttcgaaccgaaggtgatcaatgggtaaggtggtcgtcgatcaaggcgcactccgaatggcactcaatgtgctgattcgggcaggcaaaacggaagtggctgaggagttggaagcctcagccactgactatcctgagcttcctgcggacggatgctatatcgtccgctttgatgatgcctaaaaggcagacgtagacttctgcggatacgacgctcgagatgcagcattgaagtactacgatcacatcgcttggaattggaacgggcatctctatgtcaagatcgattccaacactcgcgatgcggagaagcagttcccgtcactcaaagtggcagacatacatcgcttcggtcgcgccaacccatcacaaggtgaggccagtactttccgctgatctggtcgttcaaccagacacgctcgccgttggcatctttctcttccaagacgttgtattggaattgatacaggacttcgcagaagttcacatcacgcttaagagtatggagggacaagatgtctctcctgattccttttgtgccattctctttcacatagttgttgatgaactctgaggaagagaagtaggtcatccaattggacgctacctttgagcggcgcttctttcctttctgtttgcgcataccgttgaagaacttcttaccaatgtacttcttgccgttcggcattgtgatcaggtagacgaaaccttcgtagccgtcagcgccttcctcaggaaaaggctggccacggaagtaccagggatcacactcaatcactttctttgcacgagccatatcacagtcatctgttaggtaggatgagatatttaacctcggcccctacacagtcctccagatgttaaaaagatgttaagcggaccaccacagtccaatgactctacgggatgcccagcttttaagcgctgatccagtaaccccttgatattactagcattctggtcaggaagggcaggcacgtaagtgtctgattctattgggctccagcactcaggggctgtacagatgacgggtcagcgactggcagcaatgtggttgcgggctccttaacggatcctatacactcagggtgcctgacgtctgagtcaggaaatcgggggacaaaccagtttagattgtgaggagagtgtcatgccgcagccgagatatccgatgatcggggtagtggtagccgtagccactgactgggaattggtgaaggaagtgaacaaggagcttgtcctacatggagtgagtcctgaggcaaggcgagcattttggtttgaggtcctcaaggtagacaacgcgttgaggatgggtgagatagcgcgagagtgggtcacggtacatccaaccatccaataaaaggaaagcccggaccattgagcccgggctttattgcaactatcaaccgccgaggttggtcccggcattctgtgctctctgattgtctgcactcgatccgatctgtacccaacgtcggtattggagtgttgtggtgacagtctgataggtacctgagttaccgtaggcaatgtccatggcgcctacggcaatcggataagcctcctcgagtcgaacaccataggtcggctggtccatctcattcaagttccacatctccacattagctgtgaactcgttgtagaaattgagcgtgttggaacgcacattgatgacggtattctgccataggtcgaagtatctacgggtgtctgcatcagcatcagcgtagaaggagaacgtcacaggatcgtatgcctgagtataaggaacacggaacgatgagctgttctgtgcgcgttcactcgtcaccagattgcgctgcgggaagttagccgtgtggcacttgatgttgatcgaaccgatgccattgaaacgtgcttcctccaactgaaggcgtccgcggcgtactcgtgcatcaatgaaatcagcactgccacccacaccctcaggcagcacaaatcggataaggtacttgtttggtctcatcactccacgttggaagtgagagaggaacttcatataaagggtctcgttactcatgccagtcctgtcttacgccatacctggcgggctgtttgtttctcaaattgctgtagcggaagcatcgctacctcttcccagtactcgtccgatacctgtaccaaacgtgatgtgacgtgtgatgcaagataacgatgaacacatggtgcgaagtattttgacttcacgacgttcttaaggagcttataggacacagccatataagccttgtcggttccggcacgcttacgatactcgatgagcttatccatcagcttcgcacgcatcacgggtggtaggtaatgcaggttgagcccaagccatccgtcggaatacatctcgacaggaatcacacagggaacagtatcataccagggcagtacgtctttgtacttcggatcataggtatagataaacatgccaccaatgaaggtagatgaattgcgcttggcaccaaaggcctcttcaggaactttcgcacgcttgagcttggacttagccatggtatagaaccattcgattgccttcgccgtacgcttacgatcatgaaggatcagcttttgctcgatggtctttttaggctgggcgcccgttctatttgcagtcttctttacagtagccatatgttacttccttttggcaatgcctaaatcgtattcggtcatcaccttgaattccatgccatgcttctctgcataggccctcgcggcagtccacttatcctgatttacttgataggtaacgcactcctcaagataacgctcaggcttcttccttccctttgtaggagcgatagtctgggactcaggtttgatctcaatcagcatagtctttaaggaaccatcagacatcttcaattgaatgatatagtcaacgaagtagcgacggttcttacactcagccgaggagtaatagggaataacgatctcctcactgttccactttactacggaaggattgaggtcacaccatctgttgaagcgaagttcccaggaagaacgatacaccacgtcattagcattgcctacgtacttttcaggatgaagtaggcgatagcgaccctgttgatacttgcgtgccattgttaaatcactcgtttaggtagctgcatagggattcagctataagttgataatctcggttgaaaacaggctaagaattgtgtgaaagaaacaccatagccgaaggcacctgccttttcacctggattaaatatctgtagacttctatatttaggcatacgattgtggcacgccaacgatcaaacaaaacgctatacagttacccacctgacctctcggacgagtcagtacacccagctgcgatcgagttcaagttctttgagagaagctcccctagggaaagcagtcctttgaatacggttcatctgtatatgcccgaatcggttgcccagccatctacggttgactggggcgactcaaacctcgggttcatcggaaacgctattagatcagctgccaacggtgctatggcaggactctcgggcggtctcaacgtaggtaaggctatcggggacgctgtaggtatggcaggtgatggtatgcagctgtcaggcgcctatggacttgcaaacctcggaagtgctgccgctggtctaatgggcggtaacgttactgcggaaggactaatgggcgctgtggctggtatgatccctaacccgtatgtgactgcgctgttcaaaggcgtgggactgcgtgagtttgcattcgtctttaagttctatccattccgagaagaggactgccaggagatctacgacatcatctctgtcttccgtgagaacgccttgccttcatatagtaaggactctatggggacaggcaataacaaagcactgctcaacttcccatctgagtgtgacatccgttacctatggcagggaaaggacaacgagtggattcaaaagttcaagcgttccgtctgtacgtctatcgacattgactatactggccagggtatgttctctactatgagaaacggattcccttcggagatcacaatgtcaaccaagtggaaggaactcgagattgtgacacgcgaagacatcgtggagggttactgatatgccatcgttcttcaagaagtttcctgtactcagctatacactggatgggtacaacaaggacgctatgaacatcgtcactgcggcggtgttgaagcgtatcaacgtggacaagtcctatgtctatcagtcctatgatgtgcctaatggtgcgagtgctgagtcgttggcatatgacctctacaaggaccctactctgtgttgggtgttcttccttgtcaatggtatggtgaatccgttgctcgattggcctatggatgataccgtactcgaggagttcgttgttgctaagtatggtagcctctactccgttgtctacttcacggacttggatggctatcgacttgacgatgtggctgaggcagctgtgcgtgcctatgtagatgctggtaaccctatgcctgcgaacgttcatcctgtgacagcattggaagccgaatccgtgttgaaccgtaagcgtggaaagatcgtcattgtggctccgcgctatatcaaccaatttgtagacttgttcaataagagcattgaaggaaaagtatgaccactgctacgactagtgccaactatggtgacctcaagaagtttgtcgtcaccattggcgacgttgatgtctctgctgctgtgatcagtgcacatgtctttcaggagatcttctctcctacgactactgccattgtgaacttccttgatacatcgaatctgttgatgactctccctatccgttctggtactcgtatcaaagtagagatcgagactgatatggcttctattggtgatggtgagcagtcgtgggagttcgtcatctacaagatcgccgataaggtggctagttcccagggtgtgttggagtactctgtctatgcagccgacgaggccttcctactcaatcagacaaagcgtatcaagagatcctatgcaggtaagaaggtctcggacattgctacatccgttgttcgagaagcctttggtaagaaggttgacgttgattccaccgacaatacgatgcagatgatcgtgcctgggtggactccgttccatactatgtcttggttgttacagactgccacaaaggatggcgctgccgactatgccttctatcagcaggctaacggcgacttcgcgttcaagtcgttcgaaggactctattccgatcctgacgagtactcgggtatcacgttccaggtgcgcccagctaatctaaaggacaacaagggtgattcactctacgactatgccactaccattggtgtctattggtttgaccacttcgacggactgagtaacatcgcatcaggttactactcctcaaagactgcgtcctatgacttcaagaccaaggcatgggaaacaaagacgttcaagtttggtgatgacaacgcgcaggacaagaagtacctgaaggtagactcggagtatctcatggatgccgaggatgcgaacatttcgttcattcctaagcatagtggcatgttcaagaatgcagcgtattcggatactgccgatgcctggattgcctcccgtaagtcttcgttgatgaagttcgagcaagagaagttgatcatccagttcccaggaacggcgggtgcagctagatggttcgcgaagtccgttgatgtggacctgcctgctcaggactctatgtccgatgaagagttcgatactcaacgtcgtggtcgctatgtcatcactcacatggctcacatgatcaacaaagacacctacaagatcaatgctgagctggtcaagaagagactcgaggaagcataacagctgactgagcacgcgcaccgctgctctgtttactcggtcaagacctacatacaccaatgcgatgacttgctcaggtaagccatcattctatcaataagagaattctatgtcgcaggtacacaatttttcgttcggtggcggtgccttcgagtggttcatcggagttgtcgaggatagaaatgatccagagaagctgggtcgtctccgtgttcgtgcattcggctactatgatgacgaagccattccgacttccgacctaccatgggctgtgcctatgcagcctatcacttcttccgctaagggtggtgtaggttcttctcctacgggtattcaagaaggctcccatgtggttgggttctttgccgacggaaagaatgctcagactcctatcatcatgggtacactcgcaggtgctccaggagggaagcctgatacgaacaatcttgctcgtggtgaagaccttggacagaccgtcatcgctgagaaggtgaaagccgtcaagatgtccttggcgaatagcaatgcgcttagtggtctgtctgctgccaccaacatggcgaacaagatcaactcaactgtcaaggatgctaagtctaagttgaatagtgttcgtgatcagttctcgaacatcgcaggtctgtcgaatcttcctttcatggctgggttgaacaatatctcatctaccatgacacagatcgccacacttccatctgaggctaaggcactgcaagcccaggttgaaggagaggtactcgcgatcaagggacaaatcgagaacctgaagaacctcgaccctgaggcactggcaagacagttggtacagaatcaggtgggtgatgtggaagccgcagtgagggcaatcaagtcactcgacttcgactctgtgatgggttctatccagagcattccaatggcgatcggacagatcggtcgtctccaggatgccatcaccaatgcaggaaacatcggaaagattgtaaccacgattcaagggctgtcgagatctattccgaatctcgcatccatccgagcactgggtacgacgatctcatcaatgaacggatggttggagcctactactatggctgcaccactctatccattgaacaagatcatggagaccgaaggaggtcacctacaggagttcgacgacacacctggtaaggaacgattccatcagtaccacccaacaggcacgttcaaggaagtacacccagatggatccaatgtcgataaggtggtcaaggacaactaccgtgtcgtgatgggtgatgactacctacacgtagaaggaaaagttcaagtcaacatcgtcggtgatgcgacagtcgtagtcaatggtgattgcacgacccaggtatctggtaacaagacagatatcgtgaacggaaattattcgttggctgccggaggtaatgtgtctatcgcatcaggtggagcaatgaccatcggtgcagctactcagatggctattcgtgcaatgatgatcaatctcaattgatcaaggcatgccttaaaccctgggttgagctggttcttgacccaggcacctttctttctaacttttctttctgataaatcaaattatacagaacggtccaatacggtgtccacaggactaaggacttgtacctttgataaatatcgtgacctaacagagacccatacaatgtccgactttcagcaattcctacaagaagcatccctcaaagagtgtgacgagctcaatgaaagcctaatccgttccgcaggtgcgtccttatacggcaaggcaaagactactcctgatcacgtcgcatcccaggaaaagggacatgtgaacattcacacctataagaccatccgtcgatcgggtagtgataaggaaaagacctatcacgtcgtgagtcatggcccttaccgtaacagtggtacccataagatcggttctcagcatacccatggatctggcggacaggcatctaagttggtcggcgtctccgaatacaagaacggaaagaagacgaagactcacggtgaagaccactctgccaactcccactccattcacgtgttcaagtaagtcgtaaatagaatagagacaacccaaggaacttttcataatgccaagctcgacctctacaaattaccagttcaacaagttcatggaatacttcctgaagggaactgcgtacactccgcctacttcggtttggcttgccctgttcacgactgtgcctagccttgctggtacgggtggtgtcgaggtaagcacatcaggtaccgcatacggacgtaagcagattctgtccacaggtacttcatggaacggtccatctggtaccaaccaggaatggtccaatgcagccgacgtcacctataacgtgccaacaggaaactggggtaccgtcacgggtgcaggactgtacgacgctgaaactggcggtaacctactctacatcgcaacactggcaactgccaagacggttaacaacggtgacggtgcgccacgcgtactcgcaggacagttgaagatcagtcgcgctacttgctgattgttggaaacacgaaaaagcccaggttcatcgcctgggctttttcacggctagtgatcttaggtcgttgcgatcagcctgacaaactcttcgggactgaccatgttttccttgacaccgtagtacgccgtatgccccacgacgccatccaggaaacagatctgggtgtaatgcgcccactgggtcgatttgttgcctttgacgagacggtggttgccgtcgtcatcgaactcgtggcgcatctgttcttcttcgagagcgatccaggttccttcatccagcggaccgacgacagcttcgacttccttcagccacagtccccaggctgcttcgtattcgccctgcatttcagcgttgtcccacctccgcgtttccgcgttgtagtacttggccttgatgtcgtgtgccttctcgtagttggcagacttgttccgcagggcggtgtattcgctgtggtgaatgctgttcatggtctttgtgctcacttgatgatgggttgggcttgcttcgactggtcgtactccggttcatccgggaacctgccgaagcgatcggggatcagcgcctggacaaagcctaccggcatgtcactatagaaaataccgacagcggtagcgtattcttcgagcgccttcctggtgtccgcttccacaacacggatggcgtgttcggtaccatcacggaacaccaacagtccctcgttgtcgcccatgacgaacttctccttcttctgccagccgctgatcaggtcactgatcaacttctctgcaatcatgggatgaatgttcccgaccatgatcacttcgggccagccacgttccgtcaaaccgacggtgtacacaaacccgggttccttgtctgccggatcaaacacaccgaccatggtgtaaccgttgagttcgattttgatggccagttcgatggcgagcatttcgttcatcagttcttctccagttgagagctgttcacttcgatcaacacgcgcgtctttcccagacgcaccgcatgcagtactccgtcctttgtgtagaacggcatgacgatgggaccctgaggacgcataccgccaccgatggtccacacccattccttgaagtccggtttcgccatccgttcctcaatccacttgcgttggaactcggtgagattgtaggacttgatgttcttctcgaatcgttccttagtgatcatggctcagcattcctcgagcttgatcttggaacccataaactcttcccacgccggaatgtccttcttctttccgtagaacgcgagactgacatacagccgtccctgcatgccttgttccgtgtaggtgaccttgttggccagcttcttcggaagacccaggtcgatcagtccctgtcggaactcacgcaggaacttctcgtcggtgtagatgaagccgtcgttgcgaacctgccacgtcttggcgtcgaaacgcgcgtcgatgtagagcgtcgcgtcatcctcaccatcgtagcagtatgcctgggcgatcttgatcgcattgataaggacttccttctttgcggttgaccaatgaccgcgaccactggtgtttgcgaacagttcaactttcatgagcatgtcctcagatgttttcgatcatgtgagcgcgatagcagcgtgccttactgcaatgcggctggcggaacatcaacttgttcttgtgggtcttagaacagtaggggcaagtgtcggtgagttcaactgcccagaccgctttgtaggtcgccgtctgttccgccgaagccttctggcggtcgacaaagaacgcaccgaaagcgcacactccctgtttcacctgataggagcgaccctgtgcaccgactgcatcaccaacttcgcctttcaggaacttctcgaagtctgcctgggtgtattcggcgatcttcggatactgctccttcatcatcttctggacttcggtgtctttgaagatcttgttgagctgctttgcgagttcagtggtcttcatttttggttgccctactgtttgtccgtgccacaattatatagaactttcgtgtcctgggacaatcttatagatcagacacttacgtatctgtgtgaattttagccgtgaaagagcccggatttctccgggccccttgtattacttggtctctgccaggacttcggtacgtcccagatgcacagcccgcagcccatcctcggtcatgtaggccaggaccagcttgccctcgacacgcttgggcttggagcgggtatggagccagtacttgaagtccgactcttcctgcttccgctccatccattcacgctggaagggagtcgggttgtagagcgccagcttgtcgctggagtcggacacggtctgggtttccatttcgtcacacatgatctactcctctgttatttcagcctccgattgaggcaatcaaactgtaacggagttctttctgcaggacaaccactttgtgaaggttgcggattccgctgatctgtgtttggaaattacgaccactccggtcccgtttcatcgacccccagagccacgggtcctctctaccaactccttgactagcggcttgacggtgtagtaatagagcataggtctctgttccatctcagctgcattgaggcgcctttcctctgcgactgcttcttcctttgtctcgaatggtccctgtacggagacgatgttacaacccactcgatagtgttcaacgattacgtatgccattgtcttagtcccatagtccgctgtgtgattcgtctttgaaccatttgtctgctcgctctttttccgcatcggtcatgagtgggtatgcgatacgaacatatgaacgcctttccgtcacgaggttctgtcttgcccgaatgctgctactccagttccaaaggattggctggagcagattgtcgatgtggctttctcttgtgatcattctgtctctacccaaaagtcaggaaagaaaatccaaccatttgtcgtaacccaatgcccatactccgcatcccacgagcagaccttgaagcttttcttgcgtgttgagacgtctatgtgaccatacatcgtgatcagtgttccgtctttcggcgcgcctttgacttcttttatatccataattcgctccttatgccacggcaatagccaggtttccctggctaccaccaacccctactacgaggtttttacttgccggtcagcttgtcgatgacctgcttgccgacgtccgactgtgccagaccttcgagcatgccggcgatcttcgtaccgcccttcggaccgaacatgtccaggacgttggtcacgccttcgttcgggttacctgcattgctgatgaccttgatctcagcaccctgcagagccttcgcaccctcgacaccgatcttctcgctggcctcgacctgacggagatcaatcaggtacttctggtaaccctggttctcaccgatttccttagccagagtgatctgtgcctgcaccggtgccagctgcatcgccttctcagcttctgcctttgccgtaccctcagcctggataccttccgcgttcagcttctgagcagccaggttaccttctgcgaccagtgtcgtgcgctgcttctgtgcttctgcgttgatcacttcctgctggcgctcaccttctgcctgcacgatcgcgacgtccttgacctcgttcgccttgaccacagcaaccttacgctgaatctccgaagaacgagttgcctcgacttccttgacttccatctgacgaacagtcgtttcacgctgagccgtcagcacttcctgctgcgaactttccttcgcgataccgaccgccttttccttctcagccgttcgctgaccgatagcctgttgggcttcctgatcacgcagctggactgtctgggctgctgcaatttccgcagtctttgcctgctgggtgttctcagcaactgcgacacggctgtcacgttcaattgccgaagtgcgcttggccatgatgttggcgatcacactcgaacccttggcatctcggatgtccatcagctcgatgttcttcaccggctcgacaccccagtttttcagctgctcgccgacttccttagtgaactggtcaccgaaggtagcgcggtccaccatgatcgtgtcgatttcatgcgaggccagaatggttcgcaccgcaccctgtacaaccgaagtcagctgttccttcagttcatcgaagctcgacactcgctgtgccgcaacgttcgagtctgcaattcggaagaagctcgtcacgtcaacaacgaacggaacacgttccttgtcgtacgcctcgtatgcgctcaggctcaggtcgaagaccgacacaggcaggatgatgcgcgtcagacccagcagaggaatccaggaaggccagttgtagtaagtgttgccaccatcctggtccttaccgtacgaggtctgcgacttcgaacgctggagcgtgtgtacttcattcgccggaacgacgacacgcaggttcagcacccagaagatagctgcaactgccacgagtgccgcaatgcctgcaccaatgagaataaacatcagatcagatttccttctttatcaatgaattggttggttacgttttcaataacgccaggtacgtaaaagacctgtacatcgtcgcacactcggaagaagttcttgaagtcccaatacccttcgtccgggctagcgagcaattcctgcataagagagctgaagaagtctacaaactgttctgccgcttccaggttcgcgtacttctcatcttccttacgtggatcattataacggagcgccaactgttcgtcatacagttcgatctgctctactgtcggcagcgcgtcttcggtaccccaaagtttcgcagcgacctccggatacttttcagcagcatacagccacaggttgaacagttcaaccgtttcgttttcagcgttaccggttaccttgtacggcaggtcggtatcgcgcttcttgtagcgagactcgaacgccttcgcgagcagcacatagaactgtgcttcatctttcgtcaggccagaaagaatttccgtcttgtagttgtcggcgtcgttttcccacgacagtacgtgtacctgatagccgggcttgatgttcttgctcatttcagtccttgatagtaggtcttgagttcttcgaggaactgctgtttcctcaacagagcctcagcggtgttggcgatcatgcttccgacgaattccttcggaggaatcacatcgagttcgacggcgtagctgtactcgcagtggattgcccaggtctccctgctatggagaatttcgtaccaggcgtcttcgatgtctccgttgaagtcaccttcgaaatacttccacttttcgtaaccgtgaccgccacgaccactgatccagtatcggttgaacttcatggcgcagccttctcgtagaagcgaagattgttgtactcatcgtcgcttatacgaacgaccttcgatgccttggcttccgcttcggcgaggttcatgatacggcgcagctcagcgcgatcatcatcgtaacgcgacaggtgcatacgccaagtaccgaagccccaaccatgcgggtcagtccaggtctttctctcttcgatccattcgtcaaacggcaggatcgtttcgacttcccagacacccagcttggtcagccaacgattgttgcgtcgcttgttctcatcgacgtgccactgataacggtcacctttgtaggtgtcaacccatgcttcatgagcacgagcattgacaccttcacgcgcccgctttgcgatatcgaagatgaagtcggcatcgaattcacgagtagccattagtagcctcgctcgttgtatcgctgagtacgctcttccttggtcagcacacggacaaagtccacacgctcggagtagtacccgttggaggaaccgcgccaggtgatgtgaacgaattcgcgctcagttcggattcggtagaaggtccaggtgaccgaatcgtactgacgagtttcatcactgttggattccacagtcgcagaacggatcggcgaaccaaccagagcgtgaacgtcgccatcaatggcgtcgatgtagacattctcgcagcagttctgctgatggaacatcacgaagtgctttccacaggtggtgtggaagtcgatctggtcgttggtcttctctacgcgctcgagagtcagaccaatcaagtcgtcgagcggaacatgctcaaatgaatcgtatcgcattgtatttccttaccaatcgtagttgaggcccttggtcgggttcttaagaatgctctcacgccattcgtggaagctctcttcagtgtactcttccttgcaaccgaaaatggactcatagagatcgatccactcgacagcttgataacgctcgtagccgaggtcatgcaagcgctcttcacgggcgccatcttcgatctttacgagcatgtgcagttcgccacagccgtagtcttcgaattcgaagatgatgtcttccttgcagaggcgcttgtaggcagcccaacggtctttgaaaggaatagccttgttgctcagttctttgatgacagactttgcagcgtcatcagcaacttgccgaagagaaatcacggcgtcaattgcttctttgttaagagcggtcattacgtgtcctgaaggctttggcagcttgctcgagagcagccgtacggaagagggtctgtgcgatgttgagtgactcaatgccaggaatcaggttgagcatggacgcacactcgcgaaccacgcccttcgatttcaggatgccggtttcagacatcctggtcagctcatgagcaccctcagccagatttgcttcggcaaatttctttgccgattccatgatccggataatctcgctcactggcagacgatcgtgttgccgttggagtccttcatcagcaccgcgccttcgggagacacgacatacttctgaccgtcgatacagcgagcctcatacgagacctcagctgccgggcgagagatgttcgacccaccactagcccaggtcttgaatgccggaatggcaatcgcagccaggatggcaatgatcgcaacaacgatcatcatttcaatcagcgtgaagccttttgcgttcgaattcttcatagcgttcaatgtaagcctcataatgttgaccgtgttgggtcttgaatttggaatcgagatggtctgcttgcttgaagtgacgattggctttcgcctcgtcgtcacgatcgttccacgcgttcatcaagctggcgaacacagcacttctcactgcctgcgccaactgatatgttgcgaagttcattttgctacctggatgcagtacgccttactttggattgtatagtaatagcccgcttctaactttcgtacttcctgtgaaagatagttcgcctgttggagacaaagttctttcgtctccaccggaatggtggtctgcgaaaccgaaggtacacagcctgtacctccgcacgttggtttgctgatcatcaccagaacgagcgcccactttgccaggatcattcgccgtactccaggcgaatctgacgcgccagcttggtcaggaattcgtgctcaccgccgtagtcctggaaagaaagacgacggtcttcaccgttgtgaatgcggaaagaactgccgtgacccttggtctggacttcggcaccggtcagtgtgaacggaatgtagtagcggtcgtacgccttgtcgtactctaccttgggcagcggtggaaagatctcgtcgagaatagctttcgcttcttcagaaaaatcgcactggtctttgccttgggcttcgagcagagcgtcggcgaggtactcaatcttttcttggcgtgttctgttcatgttcacaatgctacagttcgcctacgaaagaacaaccgtggtaaatattcgtgtacctccaaggactttgtaatggcaggctttaaacagacaattatttcgcacgcgccgaagatgtttcttacattcgacggtgatgcctacgatccgaacagccgactgctcacggctagccctcaggtcttcattgacgagtcgggcttcaactccaacatcatgctacacaatgagtcagaagtctacccagcctatcgcatgggtatcccttctctgattgacattgagcagacagatcaacgtagcacatcattcggttggtatggctatcagccgctcgcgcctacccgttggccaaagtctttcgtagaagtgcagcaccagtctcatcttgctctcaccgcagagcgaggttcctacactgttggcttctttgtcaacaaggcagagaaggaagacaagtggcgcgaccaagaacgcatccttgggttcaaccactacacacagacactcaacaagcgcttcatccgcaaggctgggtcgtttgacgtctacttccgtgactattgggcagctgccgaagagattcgtttcggttaccccggtggcggtgagattgtctgggttgtgcctgattggttctacggcaagaagaacttcgttgtctgtacttggaagatcacggagatcaatcctgacgtctacctcaacgaggcctatctgtacgtcaacggccatctgtatggcagctattcgacaactacggctggcactttcccatcaagcacaacaaccactccaatcgagatcgctggcgtaatcaactcttcatcatactttgaagaccgtcagacaagcgacctgcaactcgatcagatgttcatcctcaacaaagcgttgacccaggacgaaatctgtcgcttgtatagaaagtctaagtcgtacgacaacatcgcagtgcaggctcaggcatcagcatactggccaatgacagatgtggaagacccagcagtattcacgattaaggatttggcaggctacaatgacggtgtgtatcttggtggtgtgacacgcgtagcacgacagcagactgctccgagtcctatcctaggtggctcatctgtctacttccacaatggtggtatgggtgcagcacacagactgacgaacattacaacctatacgccagtgttcaacttcaatggcgattggacgattgatctttggatgcagttctcaaacacggatcgttcggtactcttctcctgtcagaaggacgactatccgcatggtggtgtgctgattgaagttaaccgccgtaacaacaccaacgtgccaggtcatatccagctctcagtgagtcaggagttctacgtttcttctcttctcaatcgagacaatggtcagcctttcaacttcaatgatggtaggttccaccacgtcgcagcagtccgaaaggggagcactgttactctctggattgacggcatcaagcacggttcggtgagtgcgcctgttcagagtctttccaacccaggtcccggtcaggtgtacttcatgggcgccgctccaggcagtctaaataccactggctacatgtctgcggttggtgtctatccttacgctctggatgatgctgagattagactgcgcaatctgtactcgttgatctatcgtatccaaggcaatgtcacactgcaaggtaacccctatcgtgctactgtgcgtgctttcagtcataggacaggcgcgttgattcgtgagatcgagtcctcgacatcttcaggtgactactcaatgacattgtatgacaactctttgattgacctgatggtcatgaacaagcaagaccctaatattcgctatcgagtctatggaccgattgcaccagctctttatgaggatgttccataatggcagttacccagtatctctacaccgacaccgacgctccagttctctacgggcagcctggggctttcatcacagtgctgaaagctgttcttgtgaacggttatggcaccaagcccggtatgggttggacgctagagtacgagtcaggaacgatcgcagtattccgtaactcgaccgctgcgggctcgacaggcatgtacctgcgagtagatgactctaactggcagtatgcgattgtcaaggcctacaagacaatgtcggacatttcgactggaactgatgctattcctggcgtcctgccttcttacagcaattcaaatatcttctggcctaagtcagcaaacaataacaacaacgctatcatgtggaacttcatcggtgacgagagaacgttctacctgaatatttgcccttggtcaagtcagaacgctaatcagtttgcgaactatgcgtatatctacgctgcgggcgattacgactcctacgttcctagctttgttcataactatttcgtagcaggaaattacgacggtggctattcatcgaatggtccttgtatgatcgacgatcagagttcctacgtatgctgtgctattggacgtgcgcaggacaatgtcgctgacaaatactccaaggcatgggtaagctacatggcaggtggtgtaccttccggatcatacaatcatcaagcgttctcagtctacacaggacagagaatcttctatcctgcatatgtgatggaaaatgctgttcagaccaatatcacaggtaagtggcgtggtttgtacggaatggtaggtcgctcaaacttcacatggaatgagaactacggcaagctcccaaacaacccgaccggtcctgatttgattcagttcacagtttccaataacagcagtcagggcgtctacatcttgaacggaggctggtaatgacaattttgattgagcctgcagtattcaagaaggaaggaacatacacttggagcgataggcgcaatcactaccttgtcatggatggcgagtttaaaaagagaccaaatgatatcggcggtctcggatacatcgcgggtatgctacctggaatcgtgacagtagacggcgcgcctgcatctagaacaattgaacttcgattccgagatggtcgtaaggaaatctttgcaagcacggtttcaaatcctgtaaacggaacctacctcattgacgacctcaacccaaagctcattgttgatctcattgcaagagagaaggaagacggagtctataacgatatcatcgtttccaagattcgtccatggacagactatcaaatgtacatccatggacctgatttccctaacgttcgaatcaagccaattttcaagcgtgtgtttgagctcaccggcggagtgatgccttatcaactcagctcagatatcactattcctgaaggaacagaagtaacgcttgatggaaggttcttgacggttaatgttactgcacctatggaaacagatctgtatatcaaggttcaggacacttcagggctttcggttgaaaagagcatcactgtcagttcctctaattcgattgtatccaagttcacaggaaattggatcctcgaaaacgaccctgtaacggacgaaccaagactgaggtcaaatcagattccgcattctggttctacctcttcgacttgggcagccgacaagaattacacacagatgtcgttccgtatgttctcatcttccgaaacaggatacgatattttctacctatatgtcaacgattcggaacgtgctcgtgttagcggtccaaatagttcctacaactacagcacgcctatcaatgctggcgatgtgattagagtcacctatgcaaaggatggtagtgcaatcagtggtaccgatgaagcatgggtgtatatcgacggcgtctaaataagacgaactcaagagaaacaacaaatggcaaactcactatacgctaaagcacgtcaacgattcctcgaaggcgcaatcaattggaacacagacacgattcgtgctcttctcgttgactcaggtaactacactgtcaacctggctacgcacgagtttgtcacctcgattccttcaggtgcacgagttgcagggccaatcaccctgacagctaagactacgactgatggtgcagccgacgcggctgacgctgtcttccctacggtctctggtgcaagtatcgaggcagtcgttctctacaaagacacaggtaccgaagctacatctcctttgatcgcttacattgacattgcatccggtcttccagtaacgccaaacagcggcgatatcaacgttgtttgggacaatggtacaaacaagatcttccgcctatgaatcatctcttcgcataccaaccatacggaccataccctttccgcggtaaggtaatgatgttgcgtcagaaccttgagcctgtgattgacccaacaatcacagtgaattggaacggatatactcaggattaccgctgtcagatgaagattgcgcctgaccagaccaagggttcttatttccattctgcaagtggttcggctgtccatagatatttcacagtcactccctcaggtctaacgctggtaaatgcaacagctgcatttgcaggcgatgttaatgactcttttgtcagcaatgattactatggttgggtagggacatcttcatcgtatatcaatgccttccgttggtcagaccacagccttatcacattgacaaagactggtctaggtacggtgtatggatgcacaatcaatccggtgaatggataccagcttgttgtcacacatagtgccacacctttcattcgttcttatgatctaagagacggttcgtatgtggatggaggggtggtgggtgctaactatcaatcttgtacctggacacctgacggtcagacggttgttgttctttcagcgtcgtctccatacgtctccaagtatagcgcgaacctagcaacaagaacaagtatttccacaaactcatcgtatggtaactcaacaagctatatgtcaggttatagctcttcatacggtcagttccgaggaattccgcattggtctaaatcaggttccgtcatcatggctccgggctccacgtccacaccattcctgtttgaggttgacactgttacaaacacagtgattccgattgctacaaatgatagcgcatatttgtatggtgctgcgtacgatcctaagaacaataaaatctacacctaccaaagccctaacggtctaacgaatagcccattcaggcgttacaacggaacaacgtatgccgaagagcctatgtcctcagcgtcatatatgatgaccggcggaaactcctcaggttgttcaactgctctgatggtagtgagttctaacactggtacgatcacaggaacagttcgagatgtcaacaacaacccggctgctcgtaagattcgcgcataccgccgttctgacggaatgcttgttgctgagacaacctcagacggaacgaccggcaactacacgatcatcactccgacttcggacactgaggcatacgacgtccagttcgttaccaacactggcgagctcttgaacgatctgttctacgcacgcaccacacctgcagcggtagcataatgccaagaaactttgtaactgtgaacggcactgtcaacattgatggtgctgctcgtaaaaaggatatcacgctgttctcttacgggaatggcgccaatcccatttacatgactaaaggtacgagcagcgcagtagacggcacgtactctatcatcggactcaaggagcgcggacagcatatccttggcttggcatcatctgattatggtcctacatggctacccggaacagcttatacggttggtcaaacggtactccctaagaccgctaacaaccactggtatacttgcacaaccgcaggtacctctgatacgattgagcctaactgggttgttggtggagacttcacaattgagtgctggttgaacagagcttcaaacaacaacatgtctgtcatctcaaagctaggccctaactacgatggatttgcttgcatcacacgcggtggtgcagtcggtttcatggtcaatgggtttgagtacaactctgctcctaatgcaactgcaagcagcacgtggtatcatgttgcctgggttatgactggaggcacaatgcgaatctatgtggatggtgccattgttgtagagcgtgctgggctgtcgattcttcctaatacctatgatgtggtcatcggggcagacaacggaacaggtgttcttgctaacttcttcaatggattcattgatagtgtccgaatcactaagggtgttgctaggtactctggtaattcattcaatgtaccaacaaaggacttcccttccttcggaccagttgatcctctgtctcctgagactaagagcctgatgcggtttgacggtgttgaaggttcaaccacctttgaagatgagaaaggctttacctggtcagctcaatccactgttgctctacagacaaaccaatacaagtttggtgggtcgtcggcatacttcaatagctcatatgcgccatggatgaaggttgattacaatgctgattttaacctcaatggtgactggacgattgagacattcttccgtcttgatggaaacacttccaatgtcacacctcacatctttgaggtaagcaatggccctggccaacgtttgaacgtctatcgagacaaccaaggcaacctgtcgttctatacagagtacaccaatggtgcttctggcgtccgtttgacctatccaatttctcctgacacatggtaccatgttgcacttgttagaagttcttcaggtgttaagatgttcgtcaacggcaacttggttggtacctacacaggtgccgttattcctgctgcctcaactgcacagatctacctcggaaactactcgttctctccaaacaccaacgacggtttgaatggttggatcgatgaattccgtttcactcgtgcagtcagatacacatcttcgttcactgttccgaccactgcatacccccgagcaggtggcgacccgtcctataacaacgtatcgtctctgatcaaattcaacgattcaatcgttgatgaaaagggtccggtttggacattcacaggtgacggcggcccgagacaatgggcgtacaagttcccacctgggtctctctaccttgttggtagtggttcgatgtctacaccaaattcagatagcctcaatctagtttccaagactagtttccctgatggcactgcaaagtggattgacagcggcgcaacggagtcacctattgcaagaggaccgttccagattcctgatcctgttgcagacacgagcacaatcttcctatctcgcaatcacgaactgcctccacaggaagagatgacagcagcaaaagctgtggtatatggtgggtgcacctcggttagcagcaagtttgccggatacaacgcgatcaagtttgatggatccacagcaggtctctattatcctgctgtggctcctggttcaggtgattggactgtcgaaggatggttctttatggatgccttgtctccatcatcttcgcaatgtgttctttacatcggagatattggtagcaacaaccatcgccttcagatgggtcctactgctgcgaatggaatcgaaggttacgtaagtgcaggtctcaatggtggtacatcttcattcgccgcatcgaatcctgtatcaggtggatctcttattcaatcaaacacttggtatcacattgcttttgaaaagtttggaaacaatacatacctgtatctgaatggaacacaggttgccacagctacccttgtagccaactactggatggttcctgcttcaaatgccaacacctatatcggtaccggtcgagttgcaagtgtaacaagattcatcaatggcagaatcggcgaagttagagtgagcaacattgcgcgctaccaaggcgtcgcaagcttccaaattccaacggcgccttacacggtttgaaacacggttaaatatctcagtctatagggctgatatcttatctgtgttgaacgcgctatctgaaaatctaaacgacgccgcaggtagcttcgatgccacttgatttcattgcgtctaatctaacccataccaaaccagtaggaactctggactttgtaagcccggaaggaatgctatttggtattgagattggtgatggtggcgagttcaagattgccggcgcacttacaggacaattcctccaagcttcttggggcggtaagcctgtctatggtcatcctgctcatgttgttgaaacaacctggggcgacaagacatacatcggtgcaggtattgcgcgtcgtggtcatgtcaacattccgaccattgttcagcaacagatcatcaagcctgccggttttgatcagtcagaattcggtgtagttcagaccaacccaacttccaagtatgttcgccctacaggtggacagatcgatacaacttggttcggtgcaagaggatactctgctcctgtaactgctgttggtgcgtcttggtctgaccagattgtaatttctcctcttgcgattgagtcgacgctcaccttcggtgatgcaaagatcgtccctgaacagaacattgaaccttccggttgggtgtcaactcaattcggtaacagctatgtcttgcattggtacgagtacgctccgccaatgtggactcttgatggttcatgggctggtaaggacgaatactttgacgctaaggatggtgtaatccatgccttgtggcgcccgcctgcagattcacagacaatcgctcctattgcattcgttgatagtgcaatgggtagtccgcgcgtacgtcaagctgtaaagcctgagggtattgcgtctactgtcaacttcggtattgcgcagctattcccttcgatctgtaataactggtcgtaccagggtgcaaccaaccgcattccgatcacgtttgacaatgttgctgaggcatacccaggcaaccgcatcccgattgagttccgttgcggatcgtcaggaattcgctactccgacttcgaaggctttatcgaagcgcgtgatggtgccgaactccaggtcaagatgtatgacggctatctgtcgctcaacatcggtgaaggtgctactctaagcccaattgatctgacgacacgagtcagcatcccgctcaacttctatgacggcgcaagttggatcggtggccgtggatgcgttgatgtatctggtctagtcaacattggctcgagcggtaacgctacaccaagcccaacactcaactctgttcgccttcagaacagtggtgatccgaccattggctcttcggttggtactcctctccttgacgtatctggtcaagacacattcgagtactcatggacacagaccctcaacggtccatggtacgacaacgactttacagatgcgttccttgagttcggtgtattcttcaaccgtcctcatagcaccatcacaacggcaaccggttactgggaatacggcactccgttcaactccaataattcaccttggctgagcttcagaatccctcgcgatcctgaaagtaaaacagtcccggtctatgcgcgcgttggcaatgagacaatcaccctccagccatttgagaagccagctggcctcgatctttttgctggtggtaaccgtcttcgtgttcgtttcctacgcaacggtctaacgcttactcttgagatctactacggcgacactctgctgtctaggcagaacccgcctgtatcctggccaacaagcgttgtccctgtttggtactaccgtaactacaacaacccatcctcgtacattgaccttgcaaacatgctgggctgtacggatggtctgctgacaacttacccagctaccaacttcaacttcggtgcaaacttctacgatggtcaatcggttgcgcttgatctgtccacgtcgacgatcctgccaatcaatagcttcgccgaagatgcttatctggctgcggtacttgatacacgtcctgtcgtaacattcccgatcaacgtctatgaaggcgcctcggtcgacctagcactcaacaccacgtctacgctacagcctgtagcatatgatggcggtgtgttcgactttgatatcaagatcaatccatctgcagacctcctgtttgcaatggcagatggtgcttcagcttcgattggtctgtcaactgcattgcagcttggcacagtcagcatgttcgaaggcgcggcagtttcagcgtcgcttgatacactcgaaaactactacatctacgatggcgcgttcgtcgaagtcggattctcgactgaaaccacgatgccaatggatggttacgccggtgagacggtacaggctacacttgatgttcgtccatcacaaggtatcggcactctcggtatctatgaaggtgcgaacgttgtcacgtcgttcactacgctgcctcaggtactgctgtatccaaatgagatcaaggatggacactcgttcaactatgacatcctcggcttcatggggattgacctcaacaatactgcttgctgcccaatcaaggacaatccagcacgtattgaactgactgctggacctgcaccagatgagcgttacgacggcgacaagactgtcttcactgctgaactgtccacactaccacgtttcagcctgaatgtctacagcggtgagcgttttgactctgttgatcctgagtacctgacgttcaacttctatgaaggctcaggtgcaatcgttgatcgtgtcgagtacagccgttacaacttcaacctgtgtgagggtaacttccttccagatggcgatcatgtcaacgtcgagcttatcgcaaccgattcgctctgtaatgactcgactctcatcttcgatggtggattcgttgatctcgacattcagaacaacgtgcagtttgctgtacctctgcctacaggtgaatacctagatgcagtggtcacaatcgacaacgcctggatcatcaacttcctccacggcgaatatgtacgtgtatcgaatcccgaattcccgctcaacttctacggtggcgaaatgtcatccgctaagtttgaagaggaagacatctacggcttctccggcgagtatgtttcggtcaacctgtccactgactacgacgttgagttccttgaagtaggctgccttgacaacgagtttgttcctgcaaacgagaacggcgaccctgattgggataagttcaatcctgttccagttgagctcgacttcttcagccactcaatcaaggctcgatgcttctaagatttctttagtaagtaaccagtaatcaaagaaaactttacaaatggctacatgtcttgaatcaattgctgcgatgggagggattggatctctgcaggagatcttccctaacactgtcatgcctttcagcgtgacatcgacggctaacaagctgtttaggctccgatcgcctcagttccagtctgttcaatttgcattcaaccttgcaggtaactcctggaacacacagatgacagtgttcagttggaacggtacaacggcgaccgcaattggttcggcgtctatcacatcagcttttgtcagcgttaccattgacttccctgtaggtgattacatcatctgccttcgaccaggaactgcaacacctcagtcgggaaccttcactgcttcattcacaggctactcgcagacagcaaatctcgtggtagatatgtttggtggcgaagagtactcatgcatcgtttctgatcctccaagaccgccacgcgagtgtaatgaggctttgttctttgaggttctcgaaggagaactcccacctggcttgcagatggattttcaaggaacaatcactggccttttgccaaacctcgattgccttgaggacacacctgcccctgctgtgaactggtactttaccgacaacgacggtacgtcatggccttggggtcgtcagtggagattcaaagtcaaggtatgggtcaatggtctgaaagacacagccttcgatgaagattggttctgtgtcaagatccacaacaactggacattcgaccttgacaacttcatggaacagagtccattccaaagagtggattatgtccgtgtcgtagagccaccgaagccactcgaggttgagtgcgcaccttgtgctcagatggaggaagtacagttcatccctcagccaattgacgctgtctgtgagccttgccaaaactctacggttgccaatcaggttgagttgattgcgatcccggttgagcttgcaggtatcgatccgaacgatgtcgtcacctggtatgacttgaacaaggacactgtcttcaccaacccataccttgagaagttccgtgatgatttgagagactcacaagttttcaagatcatcacaaactatcgagagaccaatccttacgagagcctcgagtacgctgtagcatccaactatcaaaactatctccagcttgctgagattcgtcttgatcctacaacggatccaaacaacctatctgttttgatggctcaatggcgtgactacatgaatcaatcgctgccaaccacaccaattggatacggaggagagactttcagtgtcaaccttgcctgatcaatgcgaaccgtgtcctgtaatcgagccgtttgtgcctgttgccaaactgccggacgtgctttgcccttgccctgaagaagtcgaaaagccttctattcttccaaccatcacgacacaggaagtgatcacctattgcttgaaggacgcactttacgcaatggcaacacaattattctgtgatctaaacaacggtccaaagggctgtaggtaaatattcaagatatgggactaccaacttgccgaatgacagatatgaccatgggtcacggatgctatcctccccagaaggtcttacaaggttcaccaacggttttcatcgaaggtttgccggctcacagagttggtgacgcgatccagccacattgctgtgatcactgtcaccctagctttgcggcaatgggttcctccacagtctttgtcaatggacaaccactcatgcgaatcggtgattctgcaaactgtggttccaaattgatgacaggcgcaatgacagtattggcaggctaatggctgagaacaaaatcttttccgacctagacttgaacatgatcccgaatcctcatacgggtgacctcatgcctaaggtgaatcaagaagctatcaaacgctctgtaaggcatgccttcaagttgaacgcgtatgatatcccattcaacaactcaatcaagtctagcctgaagcactatctgttcgagcagaacacccagctcacacgcgctgcgcttgagactgatctccgatggctaatgaccaaagtcgaaccgcgcatcgaagttcagacgattgatatcgttgcgcctaagaacaaagatggctttgacattaccatcacctacaagatcaagtcgatcaataccatcgactcgtttaacctgattgtcgagaaaatccgatgaaaaacttgcctgtccagtcgcttcaatttgaagacatcaagactaacttcaaggaattcttgaagggaaacgatcgatactctgacttcaactttgaagcctcaggtatcagcacgctgctcaacgtcgcgtcttaccaaactcactacattggcttcttcgtcaagatgctccttgatgaagcgttcattgactcggctcacacccgtcaggcaatgcttagccatgctaagaagtcctcatacgttccaaagggtaagcaatccgcgaaggctgaggttgttctcacgctaaccgttggaacaaacaatgagcctctgagccgtaactatccgattgaacgtggcgctactttcaaggccacaaacgatacacaggaccagcgcatcttcacggtgcttgatggttctactatctacaatcgctcggttaccggttcgactgctacctatacctcgacacctctgcgcatttatgaaggtcaattccgttcctggaacttcgtagttgacacaagcgttcagaaccagcgtttcatcctaaaggacgagatggctgacgtcgatactttccgtgtgcgcgtgaaggagaatgcatcgtcgacagtgtttgaagagtacaccattgcatctgacgtgcttgatcttgatccgacatccaaggtgttctttgtctctacagacgagaacggttattatcagatcttcttcggtaacggcgtctttggtgttcagcctgaaaacggcaacgcagttgagctgagctacatcagcacaaacggcgagactggtaacggtgctaaggcattcacctaccagaacgatattcagaatgttgtctcgacggtaacgaccaattcggtttcggctggtggtatggaaccacagacgattgaggaacttcgattcgctattccgaacgccaacaagcgtcagaatcgaatcgtcatctcgtctgactatcgtagcatcctccttgacaagttccgcaacgtcgattcgctcaacgtttggggaggtgaagagaatgtgatccgcgactacggtaaagtctatatgtccatcaagcctaaaaactcggacaagctgactgctcttagccgcacgcaaattcgtcaggatatcgtcaagaagtatggcgtggtcggtatggacgttgtgttcgttgatcccgatttcatcaacgttgacctgtcaatcactgctaagcttgatctccgtaagacgactcgctcgcagcctgaactattcaaccttatcctcgaacgtgtcaaggagtacaacgagacctacctgtccaagtttgatagcatcctttccgacgtcgatctcctgtcttacatccgacagggtgagcctgccattgtttcgatttactcttcaaagattctgtctaaggatcatcagcaccttcacaactccactgcctcgaacaatgtagtgtttggtaaccgactggtcaagggaacaatcgaatcaggtgtgatcacctatggcactgagactgtcaagttgattgatgacggtgcaggtgttcttaagttggttcgagtctctgatagctcagtgattgtagctaaatcaggatcggttgactacaccggaggagtcgtaacctatgcactgcctcaggctgctaaggttgctggctatgagacaagtacatcaggtgttcttgagttccgtgcagtcccttcggttccagacatcaacaccaacatgaacaacatcgttcgtatcgaaaccactaaggtagccgctggatgagcacactaatcccagtactcgcgcataagcttccagagtttgtgcgtgaagactatcctaatttcgtacaatatgtgcgagactatctggcctggatggaacaggacgacaacttcttgggcatcattaatgcctggaaggaaaacatggagccttcgcttcaagtcgagccttacattgatgcaatgctcactgacctcgggttcgtctcaggtcagaacctcgctgtagacaagaacctgttgatccatctgttgcaggacttctatctcagccgtggtactgaggcatcgttccgatttcttttccgaatgctgttcaatgccgacgttgagattcgctaccctcgagagcagatgctcgttccgtcattcgctgagtatggtgagcgtcatttcatcttcacctcagcgaacaacatcaacatgcttgacttccaagacctcgtactctatgtgcgtgagaatggtggtacgttgacaggactgacgactaaggtaaaggcttcgattgagaacattcagatcgtccatggctcaggaacaccatatttccgaattgagatcctccgcccgacatttgaatttcttgtcggtgaagctgtcacaatcatctcgggcgactacgctatcacggagtttgtgaagcctgttctcgcaattgaaatgaacactcctgggtctggctacaaagcaggtgaagtgattcagatcactggcgccaaactcaatggtaacgcattcatcgagagtactcgcaagggcggtgtcagtaatatccagatcgtatcatcaggtgccaactactctgtaggcgatctaattgttgctcgttctgatgatgacggtttcggtttctctgcttcggtcacacaagtcgatgctcaaggtggcatcacagggtataaggtaatcaatgaaggctacaactacgcaacacttcctaatctttatgctcagagtactgtcccagcgagccttaaggcgtcaggtggtaacgtgggtgcgatccaaactgtcaaaatggaaaacccatttgtagactttgacgccaccgatatctctatcgtaagcgctgaaggaactggtggtacattgacagctaaggctgtcagccgttgggagactcgcgaatggactgaccgaaaaggcttccttgcagagagctcaaccctgattgactctgaccgtgtgcagcagttctcatacacaatcgttagcccaatctcatcaagcctttacgacagctttgttgcagactatctacatccagtcggatttgttcgttcaagttcctacgagattgtttctaaccttggcttaaatatcacaagtggaacgcctgcaattggtactgagaccccaatcgtgtatccggcagttctaaatctcacgtttgtgtctgagtacgattcgttcgagaccatcacactcgtaacagacaccggtgacgagttcggcaccaacctatttgaaccaatcctaattgattgaggatctaagaaatggcttacagcttcacgccttctatcaaaccatatgtgatctccagcttgtacgaggccatgaagtctgctcgcccttcggctagaactccttcgacttcctactcgcttggtgcacaggtttccaacggaaataaccgctacatctgcatgcaggaaggtgttacaggtgcaggtaacggtccttccaacaccactggtgcggtctatgacggcacggttcgttggctcgcccttggtgcagacaatgtccaggatggtgacgtcatctccaacctctaccttggcgtgggcaagcagacagaatgggctaacccttctacacctgacgcaccagacacatctttgactggacagaatgaggcacttgatgacctcactgctcttatcaagattgattcttccaacctgcgacttggtctgaagaacaacacctggaccactggcacaatctactcgcagtatgatccggatgtggttacctatgctactccgaattatgctatcgttggcggcacctatgtctacaagtgcctcgataacaacaatggtatcgcatctactgacgcaccatctggcacaagcacttctctgatcgagactgcggatggctatatttggaagtatgtcggttcggtatcaggccctgagatgttcacttttggtacgaccgaattcgttcctgctcctaccgaagtcaatgttacaacagtgcagggtgagatctcgtcgttcactgatatggtatccacttcaactccgtttgctgctgctgatacgattcgcgtcgtagtacagggtaacggtacaggtgcatcaggagctgcacgttcaacaacttcgggtgcatcaaagtctttgactggtctgtatgcaaccgcaggtggttctaactacaccgaagcctatgcgatcgcatataaggatggtactccaggaacaggcgcaactctggctgcgacaattgatgcaggcaagattgatactctgaccgttagctccccaggttcggcttacacttctgcatcagtggttatcatcggtgacggcactggcgctgaagcaactgtcgttgtttcctcaggcattatcacagcagtcaacatcactgaggaaggtagcggttacacctgggcaaaggcattcatcatcccaggtacggctggcggtgttgctaaggcaaacctgtctcctccgggcggtcatggttctaatctcgacactgagctgggcatcgcgtctgttctggtttcggcacgtctttcggcgagcctgtctggatatattccaaccgagcctaccgatactgacggttcgttccgtcaggtgactctggtttcaggtgtccgtggtacaactaagaacgcactcgcctacatcggtccatcgcatccggattttgtttctggatcacaggctaaatatctcaagggcagcgggtttgttctttacatgaacaacatcgtagctatcgaacacacttcctcgcaggaagaagtgatcaagatctcaatttcgctttaaggtaaccaatggctaagcttgacctaaatcgtgctccgtatttcgacgacttcgagccgaagaaaaactttatgaaggtcctgtatcagcctgggcgtcctgttcaggctcgagaactgaatcaggtacagagcatcttccaacaccagattgaatccttcgcgaaccatatcttcaagaatggttccaaggtaagcaatgcgcgtacctccttgcagtcgaaggcttatgtccgactgaccggaacgcctgttgtttctacctatcctgagaatactcgcctgcttggtgagacctcaggcatcaccgctactctcgttcgcggtgttgacgttgaaggcgacgatccggcaactctctatgttgtctacacaggcacagcaattgacggtgagacctcggtattcatcccaggtgagaacatccgtatccttgacgtgaacagcgttgaagtcggaactgttactgtccgctgcccatcatgcccaggttccggtctgagcgatactctacctccaacaggctggggtcagttcttcaccgttgacgaaggcatcttctatttcgagggaatgttcctagatacgactcgccaagacatcatcgtggtcaagtacctcgagaagaatgtgagtggcgagatcgtcaacttctctccatgcaagatcggtctcgactttgttcagagcgtgatcacctatcaggacgacagttctcttctggatccgtcgctgggttatccaaatagcactgctccgggcgctgatcgttaccaggctaagctcgtactgaccaagcgcagctataactttgaggatggtgaaaacttcatcccactgtgccgccttggtccaggcatggtcattgagttcatgaagactgactctgagtatgctgacctgatggataccatcgcgaagcgtacctatgagactaatggtgactacaccatccgtccgttcaaggtctcgttcttcaatgctaagaagacctcggctgctgatcctctgggttggtctgtcgatggcgatgaagactcgctggtctcggttgttactccttcggttgcatacgtaaagggttaccgtgtcgagtctatctccgacacccctgtcgtattcaataaggcacgagacaccaacaagctgtcttcctttgtcaagcacttcgatggtcgcagctacatcctcggtgtgcctaagggtgcaggtatctgggcaaacgcaaacaccggtggaatgatcaccgatgcaactgtcacgatctatgatcaggctaccacaggaaatgctgctgcaggttctccgattggtaccctgaagatcagcgacgctgcctatgtctcaggaaacctcgctacaaagaacgctacctaccgttactatgtctatgacattgcaatgaacgcaggcaagaagctgtccgacgctcgctcctttgtggttgcaagctctggcttctacaccaacgcggtcattgactcggttacagagtcggttgagatctacaatgcgaaccagactgcgctgatctacaaggttgatcgtgctaacgtcaagtctctccgttccgcagaagacccactcaacggcgcaatgaacgtcgtggttcgtcgaaagctcaacggtgttgctgacggatcgggttcggtcaccttcacaacttccgctaacgaatacttcgacaacgctggttcgtcgatgcttggttggtatgttgctggtggtgtgacgacttccttcatcccaggtccgctaaccgcgttcagcccaactagcattaccgtagcgctcggttcaggcgccgccggtgcatcggtatatgtgatcatcgacgtgttgaaaacaaaccagacagagcgcacgaaaacgcctcagaatctgactgttacaaccaacactgctcctgacactgctatcggtgcagaaattgttcttggtgtgactgacgcatatcgtctgaagagtgtcaagctgtttgttgaaggttcgcctgatacaccggtggcagacatcactgacgaatacaagatcaactctaacatcactgacaccgcatatcgcgagtccaagattgttcgtaccaaggctccaagcttctcgacgaacaactcataccgccttgcgatcaacttcgattatttcgagcacagcggctcacagggcttcttcactgttgactcctatgcaccggcacttaacgctgacgactcaggagtgacctatgagactcttggtggatacactgcttcgagtggtgttgtttatcctctgtctgcttccatcgacttccgtccagacatcctgggaacaaacccagtaacatctgttctgccagctaatgaaagcaccgcaatcttcgacattgagtattacctcgcacgtactgacctccttcagatcaacaaggatggtttcatctacgtaaagaagggcgagccttcggatgatccacgtcctccgaagactgacgacaacgcgatggcactctatgagatctggctttcgccttacacctactcgttgaacgacgttcgtaccaagttcatcgagaaccgtcgctacacaatgcgtgacattggctcgctcgagaagcgaatcgagaacgttgagtactacaccactctgactctccttgagaagtcggcacaggacatgtccatcaaggacgctaatggacttgaccgattcaagaatggtctgattgcagacaacttctctgacttccaggcagccgatctgaccaacgtagagttcaaggcagcagctgaccgaaccaaggctcagctgcgaccaagcttcaagttgatgaaccgtaagctcgtgttcaatgcagctaagtcctcaggattccagctgtcaggcaacatggcacacctaccgttcactgagagcgttgcaattgagcagccttatgctaccaagcacctcagcgtcaacccatacctgcagtataaccaggctggccagatggtaatgtcgccaaacaacgacacatggtccgacacaacgatgcttccacagctcatcactaatgtcgacgccaacgttgaagcgatcaagaccattgttgaacagactcctgatcctgcaccaaaccctgttgttgaagagaaggttctggcggttgactggggtacgcacgtcgacctcaatactactgtcctaaataaggtagagactaaaccagtaactggcggtggtggacgtggcggatcgccgtggcgcaacctcaatgtcttcacccgagctaactaattaaggctagaaatggcaactgtagaatcaagaactgatacatacgatctgggcgatatggttaaggacgtccagatcgtcccttacatccgtagtcgtagcgtcgagttttacgctaccaagatgaaggcgaacactcgcgtctatgcgttctttgacggtcaagccgtttcggagttctgccgagatattggtttccagcttagcgcgtctaatgctggaactgcctcgcagcttgttgagtttggctcgccactgattacagacgcaaatggtgagctccgcggtgagttcaagattccgggcggacgtttcttcactggagagaaggagtttgtcctttcggatgacccaggactcactggcgatgcagacatgcagactacgagcgctaaggctgcttactttgctggtggcgttaatgtcacgaagcagaacgtcacacttaacgtagtttcaactgtcgtcatccctgatgcggtcaacccagcacgtgctgcacctgaacctgctccagcacctcctgctccagatccttcttgcttgaaggagatgaagaagtatcacccaaagaacttcaatgagatctgccaatgcgttgcaggtggtggaacctatggtgcctgcggtgaccctatcgcacaggcattcattgtcaacaacgatatgttcatcagctcgcttgatctgttcttcaagcaggttgacgtcttcagtgaccgtatctttgtccagattcgcgatatggtgaacggttacccaggtactaacatcatcgctcagaagtactacagcccggatcagattcagcctttcgcgtctgatgattcgagcaaggcattcaaggttgttttcgatcagcctgtgttcctcgagtcgatgacgcagtactgcttcgtcgttggtggctattcgcctaacactcgcctctgggtctcgcgccttggtgaggaagtgacgaacatgccaggaaagattgttgagcagcagacgaccactgaggtcagcttccgttcgctcaatggtacgacctggaatgcagagcagtatgagcagatcaagtatcgtctctacaaggcaaacttcactcctggaaccatgagcctcgtattcgagaacgctcatgaagatgaggaagtgatccttcctgaaaacccattccagactcagacaggtcagtcacgtgtgcgtgtgttccttcgtgatcatggactcaccacaggtgatcgtgtctcgatgagcctgaccagtgatacaccgttcacgattacgatctcggacttcgttccgcaggtcggtcagacgatgcacaccacaacaggcaagggtgtcatctcagacatcaagtcgacagctacagctaatcagtacgaagtgacactgaaggatatctccggtgtgttcactgcaggtcagacatactcgtgtgatgcaaagactcgcgaggttcgtgactggtatctcattagctccatcgacaccaagaagccagcgagctacacactcaaccagtgcttcggtaccgttgtgacaaactcgtatggcgcaaagtatccaggtggaacgattgcaggtattcctgtctccgagttcaacactgagcacgtcactggttcgctgggtcactcggttgttgaagtttgctcggttgactcgttcatcatcaacctgacaacaccagctacgatgactggtcgctttggcggaagcggaatcgtttgctataacggtggtggtaagtttgacgtgttcaacgtttctggtgcttacctgccttaccgttcctctgagaactggacgcttacaggcgttggtcatggcgacaccggaagcctgttcgaggcagctaactatcagactcaggcaccaatcgtgtttgctccacaggaagacaagttccttggtcagccgcttaagattgcttcagcaaacaacgagcagatcatgcttggtacaggaaaccgttcggtgactgtcacggcgtcgttcaactcgactgatgctaccagcactccaatggttaacatggacaccttctcggcgatcatgatttccaaccgttccgagtggcaggacaagtcgaagatgacttcgattccatacgacgctacccagcctgtatggcacgctgaggaagagattgtcaatggttccgagatctacaagtatgtgacacgtactgtcaaccttgaaaatgctgcaaacgacctctacctgtacgttgatgcctacaaggacctcaacgcagacttcgatgtctacttcaaggttcttccggtctacgcttcgggttcgattgaggcacgtccttggatcaaggcaaacgcactgaccaagtctcgttcttcagttgacacctcggatatggtcgagtataaggttgtcgcttctgagcactgcaccgcatacacctcggaaggagtcaactatgcaggttggtcagaagacccattcactgcattcaagatcaagcttgttggtcgttcgaagaactcctctaagccaatcctctttgagtcactaagagcaatcgctatcacataatggacgcaaaagtaagagactatccagaccttatcaagcgcggaggcggcgtggttaacaccaatcacgacgagtacctccgcgctaaggctcgtttgaaacaagcaaagcgcatcgacaatctagagagcgaggtaagggggcttcactcaaaactagacatcctgattggactactccagcatgatcaatctaaatgacatctcccttcgtctaatgtcgtatcaggcaactgtgcgacagacgattaccgccgttcagcaacagcagtgcagttctgacttcattgaccgtgtcagcattgccctaaataatatcgaaaatccgtctaggaacgaaacatggcaaaactcaactcgcgagaagagttcaccaactactgtctgagagctctcggtgcgcctgtaatgcgcatcaatgtagacgaccagcaggttgatgaccgaatcgaagacgccctagacctattctgggaatatcactctgatggttcggaactcgtattcctgaaggtacaggttactgagacgatgaagcagcagggttacctccagcttcctcctgagactcagtctgttctgcgcgtcatcaatgcaggctcgggtatggatggaggcggaaacggaatcgcaactatcaacctgcagtatcagcagtacatcaccgatatcatgaaccctcgccgcatcatgcaaggtgatggtctttcagcttactacatcactcaatcttacctcaacactttgaacgacacgttctctgctgaggacagaatccaattcaaccagcactacgataagctctatattcttggtgactgggatgctttgactgttggatcttggatgggcattgagtgctaccgccgtgtcatgcctgaggtttcgggcgatgtatggaacaaccgctggctcaagaagtatgctactgcacagatcaagaagcagtggggaacgaaccttgtgaagttttccaatgtccagctacctggtggtgttcaattgaatgctcaggaaatcatggatgaagcgaaggaagagattcagacgctgaagcaagaacttcacgacatgtatgaagagccaccgaatttcttcgtaggttaaatatctcgaacattaatcatttcgagaacctatcatggccttgaaccgctacttcaacactgcgaacgagaattccgaacaggaactctttgaggatctggtcatcgagatgatccagatgaacgggcaggacgttctctatattcctagagaaatctttgaggttgatcctgtccttcaggagccgaagaagactgtcttccgtcgcaacttcatcattgaggcttaccaaccggatggttacggctatccgggtgagcagaacatcatgtctaagtttggcttccgagtcaatcagactgctgacttcattatgtccaagaagcgtttcgctgagcttggaactggacgagagcgtccgatggaaggtgacctcatttatgtcggcaatccctacgatccagatttctctctgaccaacactctgtttgagatcaatcaggtatggtacaaccagcctgactggcagtttggtcgccacttcacttacaagctggtatgtgagacctggactggttctcgtgagaagttccagaccggtaagactgcacttgatacaatggagacagtgtctgatgacagcgaggagccagcacgtgtcaatgaaggcatcatctctgcgaagaccggaatcatcgttgaccagtttgatcgccacaatccattcggtgacttctaatgtcaagacctcacttctattggcagacaactaaaaagctgatcgtggcatttgctacgatctttgatgagatcgaggtcaccgatgactttggtcgaccttacaaggtacctttgattttctcccagaaagagaagttcattgaagccatctactccagtaagagtatgggcgagaccgacattgatatcacattccctcgaatgggtttcgagttggcgggtatgaactacgctcctgagcgtaacctcaacccactgaaccagattgtcgatcagatggatgacggtgaagaggtgatgacctacaaccgagtcccgtacgatctacagttcgatctctacattggtgctcgtaaactcgaggactctctaaaggtacttgaacagatcattccgttctttactcctgagctgtctgtcaccatccgtgatagagaggacttccagcttgagactgtggttcctgtcacattgaactcgacgtcggtgaatatcgactatgaaggaacctttgatacaaagcgtacgatcatgtggaccctaaacttcaccgtgaagggatactactacccggaccgtcgtgctaccaacatgatcaagcaaacgattcttaactttggtgacaaagattacgaaagaatcttctctaaatacacgagtacagtcacaccaatcgaagctggtcctaatcagattcacacggttgtggacacacatggatcacaattcgaggaataagaaatgacgtttgaagaatttctaggtgaagccatcaaaggatggaagcacgcacataacgaccttgcaaagcatcgtcgcgaacagtctcaggcaggaaatgaatggcatacgcatgcgctgaacaagtctggtaaggaaagcggcatgcacgatgctcgtaagtcgcacgcatcagaatcagctgctcgtgctcaccatgaacagttgaagaagaataacccgaactcgcatatcgcgcacaacttgtaccacaacggtaagcacgtcggaacgatgtaatgcaaaatgcccttgatgcaatctcacaatccctaggtgccgcaactcctgttgcgaccattcctcgcccatctcaagaaattgcgaaggttgatgagttcaaggaagcacctgagattgaagatgattatcaggaggctcgttctaatctgaaggaactaatcactcaggtaatggaatatgtacctgaggtagtagaactgacacgtcagtcacagtcagacaagatgatcaatgcgatggccaatctgctaaacacagcagccaatctcaacatcaacttgtctaagctgtctaaggacatcaagcaagctcctaagggtaagggagtcgttgccggctctccacaggaagaagttgctcaggtatctaatactacgaatattttcgttggttctacagaagagttcttggatatgatgatggagaaggataagcgtgctaaggaagctgcaaaggcagcccaagcagcttccgtcatcgaaggcgaatgcacaacagtagagacgtaacattccattggactcagaagagccttcggagcatatcctcacttcgttcggaattcggagactctgacgagtctcctcatagcggtcataatgtctttctgaaccttgaattttaatcacaattcggccaagctggctcaaatgatgattaagagtttaatcacaagactggtctgaccctatacaggacacggggaatcggtggcgccctattagtcaggattggtgcaattaagcaatcccgccagtccatatgccgcacagtctctgagcatatgaacacaccagttgcaaagtaagcagagctggtcaaactttaagccgtaaaggctctttgaattgtctctggtactacactcaacagactctatctcacgtcgcgactacgcttagccgacggctagttctgatctaattttgagaaacaattggtaaatattcttacagacatatggtaaatgatttcctgtggttggacaataagacttggaaacaatatgaaattcgataagacataccatggtgaaatcaatcccatggatcagtacaatggattgaacaaccttaagaaggcaggcgtcaagattcagatgactcctgaacaggctgaagagttctacaagtgctcacaggacttcgagtatttccttgagaactacgttgagattttgagccttgaccaaggcactgttccgttcgtcccgttcggctatcagcgccgtgcaatgaagaagatcgtaggcaaccgattctcaatcctgcgatggccacgacagatgggtaagactacgacagtagcagccgtcctgttgtggtacgccatcttcaacaagaagtacaacatctacgtgctggcacagcagcgtggtcaggctatggaaattcttgatcgtatcaaggaaatgtacgagtgcctgccatggtggttccagcctggtattcacacatggaacaagggttcgatccagctgggcaacaagtccaagatcgtgacagcagctaccggcggttcaggtgttcgtggtaagtcggtcaaccttctgtatcttgacgagttcgcatgggtcgataacgaccatgagttctacacagcaacctaccctgtcgtctcttcaggtgacacgtccaagatcatcatcacgtcaacgcctaacggtatgaacctgttctacaaattgtggacagaggctctgcgcggtgacaacaactatgtctgggacgatgccttgtggcatgagcatcctaagcgagacaaggcttggtatgacgagcagatggctaacatgtctgagcgtcagttcaatcaggaattcatgtgcgagttccaaggttcgtctgatacgctgctctcgccggcaactcttcagagactggtcttccagaatccgattcgtctgcttggtgatcataaggaattcaagatctatgaggatccgattcctggacacttctacgtcatcactgttgacgtctcggaaggtgtaggtaaggactactcagttgtttcggtcatcgacgtcactgaggcgccttataagcaggttgcaatgatgcgatcaaacatcatgtctccattgctgctggctgaccttgttgataagacaggtaagaagtacaacgatggctatgtgatcgttgagtcgaacacctatggtaagcaggttgttgatgccctgtggatggactacgaatatgagaacatgcttctctcccgtggtggcaacaacgatgcaaagatttcgggtgcgcgcaatgagcgtatcgcaccaggcgtcaagactacaaagaagaccaagcagatcggctgctcaacactgaagggtttgattgagtcgagtcagctcatcatcaacgactacgacactatcgaggaactcaactcgttctctaagaagggaacaagctatgaggctgagaagggcaagtacgatgacattgtgatgagccttgttatcttcgcgtggttctctgcacagccttacttcgaggacacgtttgatcagaacacgagagatcttgttcgtcaaaacatcctgcaggacgctgagtatcacactgccttcggattcatggacgacggcactgacgatggtttcgacttcggctttggcaagcagagtgaggaattgttggagactttccactaacctgagaacataaatatctcagacatattgcttacatgaagcacgatttttgatctcaggagaatatagatggcatcatctaatctaagccctggagttggtttcactgaaactgacctcaccaacattgttggttcttctggcacctcgggcggtgcatttgcgggtgactttgcgtggggaccagtcgagcagattgcgacagtgtcttcgccattggaactcgagaagacctatcacaagccagatgacaagaactacacttcttggttctctgcattcaacttcctcgcttatactggcgacctgaagattgttcgtgcggctgacgaagatgcaatcaactcttcggatgacggcaacggcttcctggtaaagaactcgaaccactttgaagttgtcaagactgctcctacaactgtgcagttcgctgcaaagtatccgggtgcactgggtgactcgatcgctgttcacatggctgacgcttcgacgttcgctggttggcagtatgcgtatctcttcgacaccgctccgggctcctcgcagtgggctgaatcccttggtgcagcgaatgacgaacttcacatcgtgatcgttgacaagcagggtaagttctcgggcgtggttggttcggtgcttgagaccttctcttacctgtcgaaggcttcggattccaaggatgcgaacaacggtcctaacttctacatcaacgtcctgaaccgtacttccaagtatgtctgggcactggctctgccaactggcgcagatctgtctgctccttcgaccggtaaggttgcttcggtaactgtcggcgcgggtggtacaggctacactgcggcaccaaccgtaacattctctctgccaccagcaggcggcgttcgtgctaccggtactgcaactgtgacggctggcgctgtaactggcgtgaccatcacaaatgcaggttccggatacgtcacggctcctactatcacattcgcaggagcgggtacaggtgcaacggcaactgcggttgttggcactgtcactgacgctgcagaatggggtactccaggtgtggttgcaggtgaagcacagaccttcaagcgccttgtcgctgtaaaggctgctcctctgaccggtggtaaggattcgactgctatcactgcaggtgacctgactcgcgcttacgatctgttctcgaaccaggaagaagtcgacgtatcgttgatcttcactggcgatgcaggtggtgagactgagcacaacgttactgtccagagtgcaatcgacaacctcgctgaatcccgtcgcgactgcgttgtgttctactcgccgcagctttcggacgttctgaacaagactcagtctgacgcagtgaacgcggttgtatcgactcgtaacctcgttggacgcgcaagctcctacgctgttatggactcaggttggaaactccagtacgacgtttacaacgacaagtaccgttggatcccgctgaacgctgacctcgcaggtctctgcgcccaggttgacagcaccaacgatccatgggtcagcccaggtggttacactcgcggtcgccttaagaacgttgtctcgctggcgttcaacccgaacaagaccagccgtgatgcgatctacaaggtcggtatcaacccagttgtcacgttcaacaccgacggaactgtcctctacggagacaagaccctgcttggtaagaactcggcattcggacagatcggtacccgtcgcctgttcatctccctggagaaggacatctcgactgctgctaagtattacctgttcgaaaccaacaacgacttcacccgcaacaacttcgtgaacatggtttcgccgaagcttgagcaggttcgcggtcgtggtggtattgaggacttccgcgttgtgtgcgatacgtcgaacaacaccgctgaggtcatcatgaaccgtcagttcgtaggctcgatcttcatcaagcctgtctactcgatcaactgggtacagctcaacttcgttgcggtccgtcaggacgtcagcttcgacgaagtggtcggtggtacattctaagaacaactactcgtagtattcttgagccccgggaaaccggggcttttcttttgcctaaatagaacgatgacaattggtaacctggcatgacatttgaagatttcctatacgaagcgtttggtgtgaacgaggtcgtgacctatggcacaaacccgacagctgacaatggcgccttctcaagacatgaaggttctattcacacctacatcctgttccgaggcaagaagtttatgatcttgttcctcacacaggacagctcaatcacattctcattggtcagcgagaagaaccttgattcgacgttgattcctcaaaaggagtctaaggatggtctcgtgttctacaacaagatcttctcggctatgaacgtggtgctcaatgctgcacacgctaagaagtttcagtttgaaggtgaaaccgacgagcttaaagacctctatagcaagttcgtgtccaaccgatcattcctcagaatgctcaaggacaaaggctggcgatatgatggagagaaatacgaaggtttgtatcttttctcgaaggtgtaaatacctacgtatacacattactaggtaattgattatggcaaatcgcagcggacaaaagacttacacttacctgttctattggtccgaacaggacaaagcatactatggttaccgaggcgcaaacaaggtatcacctgagaacgacctatggacagtctacaaaggttcatccaaggtagttgatgcctttgtccttgaatatggtgaacctgatatcgttatgatcgactcaacgtttgatagtgtggtcgaggctaaggaattcgaacgcgaaatgatcgctcaattctctatggacacttctgatcattggctgaatctgtctccttcgcacaagaactttttccatgggaagtctcacactgctgagacacggaagaagatgtctgaaactaggaagggtaaggctccgcctaataaagggatcactggcgtatacaagcagacagctgaaacaattgccaagcgcgttgcagctacaactggattgaagcgaactgaggaacagaaggctaatctaagagcagggcaagccaaatcaaaagataatcctaactattctaaggacagaagcgaccgagctaagaaggcttgggggacaaaacgtgctaacggctatgtaggtcctaacaaaggtagagtgttttctcctgaggcgagagccgcaatgagtgcaggacagaagaagcgacacaaaaactaaatacacatgattctaatagtatggttgagtccataggaatcattctcaactcaatcaaataaggagccatcaagatggcacaagcggacgtatattctttcctgagcaattttcgtggtggcggtgctcgccctaaccgttaccgcgtcaacatttccttcccgctgtctgtaggtcgcgctgttgaagcagcaaccaagatcagcttcacctgccagtcggcttcgattcctgaatccacactgggtgccattgacgtgccttacatgggtcgtcaggtaaagatcccgggtgataaggtttggggtgattggactgttcagatcctcctcgacaacgacttcctcggacgtaccgttttcgagcagtggcaggatcagctgcttggtttccgaaccaacgttgctcagccacagatgctgaatccgatcttctcgtatgcacaggcagacatcatcactctggaccgtgcagaccaggaagtacagcgttaccgcgtttacggtatcttcccaacaatggttggcgaaatccagctcggctacgaccagaacgaccagatcgctctgcagccagtgacgttcgcaatcaatggctgggaatctacagctacccgtttctaagctatgaaacgaaggacagcccagtgaaatatctgggcttttctttggattaaatatcatgtgaaaccatgaaggaactatcatgcagatttttggttacgaattcgggaagaagaaagaacctacacaagagttgaccacgttcaatatcgaccgtgagactacctctgaggtcgtcgttcctgagacctattacaatgaccatgcgggcgtcatgtctgtcccgtatgagttgctccagactcctgcggatgaagctgagcttatccgttcttaccgagaccttgcatctaccgctgaggtcgatgaagccttgcaggaaatccgaaacgaagttttcatcttcgacgttcctggtaagaaggctgttgaactagattttgtcacagagtctaagctatcagctgcgatgcgcaagaagattgctgcagagttcgatgaggtttacaagctcactgactttgatatcaacggcgcgcagtggttcgacgattggtatgtcgactccaagatctacctctacaagatggtagattacaccaagctcaaacagggtatccagaaggttcagttcattgacccactcaagattcgtcttgtccgtgtcatgcccaagcctaatccggatggaaccttcgatgctgctaaggtcaagcagttctatctgtatagcaactttgatcctaagtctcatccgctcaatcaggttattcagctccagcagggtacatcaatccaaggcattcaaattcgtccagagagcatcacctatgtgaactctggtctgtttgatcgcaaccttggtcgctttgtcggttatctgaagaagtcgattgtaccattcaacatgctgaagatgatggaagatgcaatgatcatcttccgtgtcgttcgtgcacctgcacgtcgcgccttctatgttgacgtgtctggtctgcagaagaacaaggctgaggcttacatcaaagacctcatggccaagttcaagaacaagatggtctatgactcgaagacagggcagctgtctgatcgtcgtaacatcatgaccatgttggaagactactggctgcctcgtcgtgaaggcaagtccactgaggttacgaccattgaaggtcagaactctcaggacatcatggatgaaatcgaatacctacgcgacaagttctggcgttcgctaggcgtacctcgcagccgcttcggtgaccagcagactccaaacctgtttggtaagggtaacgagatcactcgtgacgaatatcgcttcacaaagttcctgcacactctgcgctcgcgattcattcctgttctggaagacatcctacgcactaacctgctgctcaagaagatcattactgaggcagactggaacgatatcaagcgcgatatcatctggaactacactgaggacaacaccttcgttgaatcgaaggaaacggaaatcctcaacaaccgtctcaatactttaaatacaatcgatcctcatgtaggcaagtatttctccaagctgtatgttcagaagaacgttcttcgcatgtccgagaaggagatcgcagaagaagataagcagcttgcaaaggaacacgcatcaggcatccacgatgacccagatgcagaagacggcgacaatggcgcgactttcagcggtaacgctccgcctcaaggtcaggatgacggagaggaacaagagtttgcagacatccagccgggcgaaaacccatttccaacagattaaaggagccgattaatggcaattgatatcaacaaattgaacgcctacgacttcatcaaggaaatgaaaagccatatggctaacgtccttgaggagcgtctagagagtggtgaggtttgccctccgctgcctctggaagagcacgtagctaaggatacaaccgacaccgattggactgcaatgggtgaagctgaaaagaacctagtcatctcgctccgtgagaacggtcgccagcgtggttcagacgaaggtgcttatgcatctggtgtcctttggctgacattcaagaacaagaaggcttgcgaagactactgcacctacctcgaaactgccgatggcgttgacacctatgagattgaagctgtacgcgaagatctcgtgaacggttttgtcgaagatcaggaatatgacttcggtgacattatgttcgacaaggactttgagttcaacgtctacgtctatattgatgcagacctagttatgcttccggctgaagatctcgaagttggcgacgagtttgaatgggacgacgattcagacaacggtttcctgtccgaggttcgccgaaagatcaaggtaaacttccgcggtaagaagcgcatcaagatgcagtgcagccctggattcaagtgggatgcggcagctaagacctgtaagaagatctctggtgctcaggtagctgttatgcgaaaggcaatgcgccgcgcagtattgaccaagaagtcgatgggccagtcgttcaaggcacgagtcgttcgcaagacccgcaaggctaaccgcttccgtaaatcatttggactgggacgctgagatgacgtttgacgaatacctagcagagcaaaacttggctgcgatggctaatcatcacttcactaaggctaagcgccacaaagaaggcacgctgcattggcataagcacaatgcgcgtggccacgcactttgctcacaacaccacgataagaacggcgaccacaaaaaggctgccgagcatcacgccaagtgcgaagagcacattgccgctgccgaaaagatcgaagatcagaagcacggctattaagtagaagagagaacaggaaatgcaagtactagtagaacgcattgacgatgttcgtaatgaaatcctcgttgaggaagttggtggcatcaagcacaagaagtacatcatcgaaggtatcagcatccaggctgaggtaaagaaccgtaatggtcgcgtttacccaaaggaactgatcaagcctgagatcgatcgcttcattcgtgaagacattgcacttggacgtgcagtgggtcacctcaatcaccctgcaaacgatccgcgtaacgactataaggaagtgtctcacaagtatgagtcgctgactgaggacggcaacaactggatcggtcgcgcagtcgtaaccacaggcacaccaaatggtcgtatcgttgctggtctgatggatgaaggcgtgaacatgggtacgtcaactcgtgctcttggtaagaccaagatgttcgagcagcgcggtcagaagacagctgtggtgcagagctttaggctcatctccccaggtgacattgtatctgatccgtcggcaccagatgcatacctcaccaacctgatggaaggtaaggagtgggtttgggaaaatggtctcctgatggaacgtgaagtggagattaagaaggagatcaatcatgcagctcgcacaggtacactgaacgaagcgaagatgattgaactgttcaagaagttggttgctctgagcaacggacgcgaagtctgagaatttctcagaactaaataccatagaacttaaaacatcattctgaaagatcttaggagtaagtaatgaatgaacaactaaaggaacttctggagaccctagagctttcagaagaaaccgcaactcagatccagaccatcctgacagaagcatttgcagctgcaaaggaagaaggtaaggctgagggcaagaaggaagctgatgaagctgctgacaaggacaaagaagcccttgaagaagcacatcaggaagaaattgcgttcctcaaggaacaggctaatgcctacggaacccacctgaaggaaaaggctaacgcttatggcgagtcgatccaggagtccgttgttgctaaggctaaggagtatgctgagttcgcagttgatgcattcatcactgagaacaaggaacgcttcgtagaaactgaagagttcgctcgcatgaaatctgcgttcgagttcatcaaggaagcatttgagaagaatgcgttccaagttaaggaagatgctgctgtaattgagctgacagagtccctacaggaatctactgctcagtatgagtcgctcttcgaagacctctctgctgctaaggaagagcttgcacagctgaaccgtactctgattctggagcgcgcaactgctgatctggctgagactcagaaggagaaggtaaatgaattgcttgaggctgtctcgttcgattctttggatgagtacaaggacggcgtagcaatgatcgttgagcaggctaaggctgtggctgccccagcacaggttgcacctctcgccgacaccccggaagtgctcaacgagcaagcgaccccggctaagaaggaagtcaaccaggatgtcaagcgcctgatgggcaagggccttctgtaagttgaattcccagaacataaatatctgagaattgtttaattcgtatttgagatttttaggagaacaaaagatgtctcaagaagaaaataaagtggataccctcctagagaagtgggaaccagttcttgaaagcgaaaaggcagatgcaattactgacccgtatcgcaagaaggtaactgctcagcttctggagaacacacaggaagcactgaacgaagcttcgaacctgaccgccggcgtgcagaactgggaccctgtcctgatctccatggtccgccgtatggctcctaagctgatcgcatatgacatcctcggtgtgcagccaatgaccgctccgtcgggtctgatctttgcactgaaggcacgtcgtgctgctaccccaccgaacactggtcctcaggctggtgcagaaatccttggtctgcaggaagctgatacttcgtactccggtaccggtactcacgctgcaatcactgatgcaaacttcctgactggtttcgcgaccggtactggtaaggtcacatcggctggtgaagtggatccatggaactcggtcggcgtcaccatcgacaaggtcaacatctcggcagttacccgtcagctgcgtgcagactactccattgagcttgctcaggacatgaagcgcgtacacggtctggatgcagatgctgagcttgttcagatcctcagcaacgaactgatctccgaaatcaaccgtcaggttgttcgtacggtctacaacgctgctaaggtcggtgcgcagtttgcttcgtccccaggtaccttcgacctgaatgctgacgctgacggacgttggtctgttgagcgcttcaagggtctgctgttcgcaatcgagcgcgacgctaacgcgatcgcaatcgagtcccgtcgtggtaagggtaacttcctgatcgtctcgtccgacgttgcttcggcactcgcgatggcaggcgttctggactacgctccagcccttcagggtcaggtttcgctcgaagtcgacgcaaccggtgcaacttatgccggtaccgcaggtcgcttcaaggtctacatcgatccgtacctcggtaccgatgcatacctggtcggcttcaagggttcgactcagtacgacgcaggtctgtactacgcgccatacattcctctggaactgcaccgcgctaccgacccaagcaacttccacgctgctctgggcttcaagacccgttatgcaatggcagagaacccattcgtgggcaactcgaccagcatcggttcgaacgcgaactactactaccgcaaggccctcgtcaagaacctcatgtaacagtgaggtccttacaggacacggttgtaaagttttcagacaagacccgctcacaaggcgggttttgttttggttgaatttctaggcatctacaatcgtacatctctatgatgcatctttctggactgttaaaatgctcttgaaccagatgggtagcaaatagaaagaaagttagaaagaaaataaagaaaggagtatagatgccaccgaggtgtcgtgcccgaggctaaaagattcggcatgtagtacatagacacacgtggtaggtgtagcttttaagcaagaaagtgagatcccttgatactactaggtttcagtagatgaaggggtaattttgaaaagccgtagaacccttgatattactaggagttgcgtatgcagttttattcttcaatgaccttggcagactttgtagcagccaattggacactgatggaccctaatgtggttagcctcattgaacgagaagcagatcgtcttgctgagttggaagaagatgtgatctcgtggaaggcaatttcggaagacattgttgatgccaatgaagacaatcgtgattacattctcaatcgaattgaagacatcaagaaaggttcctacactctaaatgagcttgaagagttcgttcgtcacatggatacatcagtatgatcagactcattggactaacaggtaaggcaggaacaggcaaggacacctttgcaggtttcatcaacaaggccatcaattttgaaccgtattcgtttgcaggtccactcaaggatgcttgctgcggactgttcggatggactcgtcatcagattgatcatgacagagagttcaaagaggcaatcgatcctcgctggggtttcagtccgcgtcgcgcaatgcagttgatgggaacagagtatggacgtcagatgcttcgtgatgacatttggattcacatggctaagatcaggcttgatgaaactcgtaaggcaggtctgctcgttgtggacgttcgttttgagaacgaagcatcatggatcagagacaatggtgggttgctcatccacattgaacgtccgggagcaaagtctgtggctgcacacgcttctgaggcaggtgttgcctttgaagatggagacctggttgtcaccaactccggatcattggatgctctccagatcattgcacagaacatcgtgaccaacctgagattgaccgattaaatactggcatgaccagtaaaacaatcaatcgaaatccagcgatcaacaccagctataagctcgagattccgggctttgattcgctgaactactttgtgcagtcaaccgaaatcccgtctctatcttcgggtggtgttgaaaccgcatatcaaaactggggtacgaacgtccccagtaacagaatcgagtttgatcctctgaacgtcaacttcttggtgtcagaggatctaatgaactaccaatcgctctatgagtggatgattcagatcaccatgactgagcctgtagttcctgagatgatgaagaacattgttctgcacatcaccaactcgtctcgtaatcataagatgcagattcgattccataaggcatatccgaccatgttgggttctatcccatttgattcaggtgtcaatgatgtgaatcctctgctctgttccgcaacattccgttatcaatactttgagattattcgcgatgcgtctggacgaacttcaagctgagattgccgttgactctgcaatcaataataatgccctggatacggaatccctgaggattccaatgttgcactcgaagtactacaactacttccttacagagcttcgtattctgaaaggcatcgagattgaatataagcgtgtgaagaaagaacgccaccagtattggctgggacaggcgagtgatgaagtctacaaggctgagcctaaagacatcaaaatcctcaggcaagaccttgaactgtacctcgatgcagatgagaagttgactgagctgaaatcgaaatatgagatgcaaaagatgaagactgagatgctcgaagccttcatcaagacattgaacacaagaaacttcctaatcaagaactcaattgaattcctccggttcaagaacggcggatgacataggcacgaagaatgcaagcagatatcaaacttcactataagaacgaattacacgtcaccctggactgccctgttggcgtctcctatgaagtgtctgaggcgtttgcattcttcgtcaatggttacaagttcatgcctgcgttcaaggcaggtcgttgggatggtaaggttcgcctttacaacatcaaggaccgcaacttctacattggtctgctgccaaagctctttgaatgggctgaggaaaacggctacaccattgaatacgcgaacccgaaagacttcgagcgccagtacccaaccatcaatgaagagtcttggaacgagctgaagaagtgcggcaagtttgagcctaagtggtatcagaaggaagctgtcttcagggcaatcaatgagtctaagactctgatcctgtcgccaacaggctcgggtaaatcttacattcagtatctgatcacgcgttacctgcttgatcacactgatggtaaggtcctgatgacggttccatcgacgtcgcttgttgaacagatgttctctgacttcaaggactatgtagctgacgattgggacgttgaagagaacgttcaccgtatctactctggtaaggagaagtacacagaacaccgagtcgtcatctcgacctggcagtctgcgatcaagctacctaaggcatggttccagtctttctctgcctacatctgtgacgaggcgcatggtgcagatgcgaagagcatctcgcagatcattgaccagcttggtcatgctcagttccgccttggactgacaggtactctggatggtactaagatgcacgagcttgacatgcaggctcgattcggttccattgtgcgcgttgcctctacaaaggacctgcaggatgaaggttctctggctccgttgaacattgagtgcttccagctgcgatacagcaaggatgatatcgctctcgtgaagaacatggactacgatggcgagatcaagttcttggtcagtcatccgaagcgcaactatctgctcgcaaagactgcattgacgcagaagggtaacaccttgatgctgttcaactatgttgcgaagcatggaaaggtgctctacgagttgatgaagccaatgtgcgagaagtacggaaagaatctgtacttcatctcaggctcaactgctgttgatgaccgcgaacagattcgtcagattctggagaaggaaaacaacgccatcctactcgcatcgtatggtacgcttgcggtaggtgtcaacgtcaagaacctgcacaatctgatcttctgtcacccgatcaaagccgtcatccgaacccttcagtcgattggacgaatccttcgaacggcagaagggaaacaagatgtaaaactcattgatatcgcggacgatttatcctatactacacgcagtggggtaaaaaagcagaacacaattctgcgccacttcctagaaaggctcaaaatctacgtaggcgagaaatggaagtacaaaatcataccgatcaagatgggcgagtaagcgaaaactcagctgtagatttggtaaaggtcgaatcgggtaaggcatatccgattcggctaatgcacttcccaaacggtttgaatgtcattggttatgtgattgcagtcttcccagagactacgatggttctgcgaccctatacggtcacagttgattacaatgcacatacagataatgtcgaaggatatgagttcagtcctttcctggatcagatggcatatttcaatccactggatttgacgccggttcccttcatgaacaatcagatgatcgccattgtgcgcccatcagaacatgtggtgagcaattacaccggcgtgatcaggttgagagaaaagattgcatctacccctgacgatgaacactttgagatcctagtatctcgagaggttcctgatagtaagacacttcactaatacggcattttcagcattgaccgaagacaagaagaaagcaaatcactatgtagacaagcaggcgctctacgctgacctgtgtgaatggaagattcggaaagacacggcaatcgctgaaggcaggaaggcaccacccctaccagattcggttggcgatgctatcatgaaggtagctgagggtcaggcatcacgtccaaacttccgtaactatacctatatcgaagagatgaagggcgaaggcatcatcgcagccgttcgcgccatgaactccttcgatccaaagcgcctcggtaagaacggtgaggttaacccgttcggattcatttccctgtgcgtatggcgagcattcttaggctacattgcctacgagaagaagctccaaaagactaagatggatatgatgactgatcccgtcaacgagttcttctcgacgatggatggcgatcacggtcactacatcgacaactacgacgtcgttgaattcatgagccactgaggtaatcatatgaagattgcaatgattaccgatcagcactttggtgttcgcaatggctccaagttcttcttggacaactacgagaagttctacaatgagatcttcttcccgactatcgacgaactaggcatcactcacctctggatgctcggtgacttttgggaataccgcactcgtattgatgtggttactctgtggcgcgctcaagagatcttccttgaccgccttgaggaacgtggcattcaagtaaccatcatctatggtaaccacgacgtcgcctacaagaatcgaaacgacatcaactcgatcgacttcttggcgaagatgtacaagaacatccatgtggtcaagacacacgagacgattgagtttgatgggactcctgtcaacttcctgagctgggtgaacaactccaacctggcagatagtctcgagttcatcaagaactgtccgcctaccatcctgtgtggtcactttgagatcaagtcgtttgaaatgatcaagggtcacgtatgtgaacacggcttcgacaagagcctgtttgatcgctttgatcaggtctattcaggccacttccacacggtctctaccgacggtcgaatcttctacatctcaaatccatctcagaccaattggtccgactacggtctagacaaaggtttccgaatctttgacacgaccactcgagagttggaatttgttccaaatccgtttgatgtctactccaagatcgcctataatgacgacattgatatcgtagagtttgactacgatggatatgccgataagatcgttcgtgtctatgtgcagtcttactcttcaacaaaccagcacaagttgagtctgttcctcgagaagttgaacaaggttgtctatagcgcagacctgatcgagatcgacgagactcaattcaatagcgagactggtgacctgcaattcgtagacaaccatgagctgattgagaaatacatcgaagaggttgttcagagcccaaccattgacaagaacgtcctcaaaggcatgttcaaggaaatgtaccgtgaggcactggatatggcagagacagaatgacaacttatgtagatgaaatgagaacagagcttcttggatatgccgctcttgatcctgaaatccttgcattcatgcgcaagcatttgcctaggatcatcgctgaagaacttgtaggtgtccaaccaatggatgaaggtggcaaggcctttgaggagctctatcagcatcttaaagcgactaacaaagcctttgtcttttcgagcaattttgaatgatctattttcgtaaactgagattcaagaatatcttgtccttcggcgacgttatgaccgaagtacagctggatcgctcaccatcaacaatggtcatcggaaagaatggtgtcggtaagagttcgctcttgctggacaccctcgcctttggtctgtttggtaagcctttccgcaagatcaagaaagagcatctgatcaacactaagaatggtagagatgctctggttgagattgagtttgacaaggatggcaagagctaccttgttcgccgaggcatcaagcctggcatttttgagatcttcgaggacggtaagctcctgaatcaggaagccaacaaccgcgactatcagaagatcttcgagcagcaaatcctctgtatgaactacgacgctgcctgtcagatcattctggtcggtaaggctcagcacacgatgttcatgcagctcaacactggcgaacgtcgcaagtttgttgaggttgtgctgaacctgatcgtgttctcaaacatggcacgtctgcacaatgcaaagacgaccgagcttcgtaaccgcatcggtgaactcaagactgcaatcactgtcgcagcagagaagatcaagatccgtaagaagtatattgatgacctcaagaacgctgataagcaaaatgcagcagcagaacttgaacgtatcaatgctcagattgacgagatcactgctcagttgaccgagctacatgcgcgtaagagcgagattgaaacggtcgaaggtattgacagggatgcctataagaaggcgatgaatcatctgtctgagcactccaagatgatcgtcaagctggacacttctctgtctcagattgagaacagtctgcgccagttgaacaagtctcaggattgccctacctgtcatcgtcctctagaacatgaggatcatgctaagcaagtcgatcaccttacagataagaaagccaagatcgatctggcaaagatggagctgtctgttcgcattcagcaatttgagtcggtcgtggctgaattcgaggttgcggttgctaagtacgacgcctacatcgacaaggttcgctcggttgacatgcagattgcatcggctgaatccaagcgagacttcctggtcgctgagacaaagaaggaacgtcacagtcaggcagacaagatcaaggaagcaaacggcgagttgaaaaagctcgaggacatgcacaccgctctggtagacaagctggaacagctttatactaagagtgattacatgagcctgattggaacgatgctgcaggacaagggcattaagacaatgctgatcaagcgcttcattccgatcatcaaccacgaggtcaacactcacctcaatcacctcggtctgttcgtcaacttccatctggatgaaaactttgacgaaacgatcaaggcacgaggctttgacaccctcgggtacaattcgttctcagaaggtgagaagctgcgcatggatatggcgcttctgatggcatggcgcgatatcgcacgaatgcagggcaacgttgcaacaaacatccttatctttgacgagatctttgacagctcacttgaccaaggcggcgctgacgcattggcagacatgcttgcactggtgaaggacttgaacgtcttcatcgtcacgcacactccagagaagatcattgacaaagtccgttcaaccatgaagatcgagaaagtcgacgggtttagtagaatcgtatgagcacattctttcaacagttcttcgaggacacctgtaaaaacgtccttagcaatcatctcggcgagttgtcggatgaggtaacatatcaagagatccgtattgatctagccgaatatgctagactcacgggagtccaaattgttatgaaggtcgttggaccaaggcacctgaacttctctacatggagtcaggacgttcagtatttctatgactaccaatggtaaaagatcatgagtaagcgtttgacccagtacttctatctgtacgaactcggtgagaacaccatcaccgagcgcatcacattctttgagggcgaacgtcccgaggctcttgccattcccggttggaaggggtggttggacgagttggtccatgcaggtgaagctgcattttgatacatgcctgaggttacatgttgcctcagtcacctacctgttagtataagcacatattgttcacttaggagttgtaaattatgagtttgtcatctgaaactttgaatgttctgaagaactttgcctcgatcaaccagggtctcctgttcaagccaggcaatcgtcttcgtactctgtccgttctgaagaacgtgttcgctgtcgctgaaatcaacgacgagattactcgcgagttcgctatctacgacctcaacgagttcctgggcacgatcagcctgttctccaagccgcacctgaccttcaatgaagatcacatcctgattcaggacggcaagaccaaggtcaagtacttctatagctcgccggcagttgttgtctcgccgccggacaaggatatcgtgctgaccgatccgctgctgaccttcgaactgaccgaaggcaacatcaaccagattcagaaggctgcggctactctgaaactgaaggaactgtcgatccgcgaaggcaagctgaccgcactcaactcgggtggcgttggcaatcagatcaccattgagctggataccgaaggcaagatgagcgacgagaagctcgtcaagatcgagaacctgaagctcatcgaaggttcgtacaatgtcaaggtcttcgagcaggcagttgagttcagccacatgaccaagccgggtctcgtctacctggtcaccgtcgaggccaagtaagatgacggccatcttcgggaacattctcgatcaggcgctggagctaaacctccagcgccaggccatcaatgctaactaccgacacaacttcgagccacatatgtggatgcgcgagttctgtacggttcgcctgcagatcggtcgtggttgtggtcacacaatggcaatccgctctcgttctaagcgagatgatttggtgattgttccgtcgtcattccacatcatgacgatgtctgagaatcgagttgagaagcctactgtcatttcctcgacagacccgaacgccattgtccttcgcggaaagactttcaagcgaatctgggttgatgatgcttcgattcgttctgatggtgatattcggaatgtgtatgtgattgcattgatgcatcgtgccgaacaaattatccttgtaggctgatttaacaactgtgagatattgataatgagtgacgagaaagaaatgtacctgtggagtgagaactatcgtccgcacactgtgaatgactgtattcttcctccacgtttgaagacctacttccaggcaattgtggataagggacaactggccaatatgacgttggttggtggaccgggtacaggtaagaccaccgtcgcacgtgcgatgtgtgaagagctgaaaatcgatcatatcgtcatcaacgcgtctgagaacggcaacattgagacgattcgtactacggtacgacagtttgcatcgacggtcagcttcggaggtggcatcaaggccatcatcctggacgaggcggacggtctgacaaagaatgctcagcaagctctgcgcgcctcgattgaagagtttgcaggcaactgccgcttcatctttaccggcaacttcggtaatcagattatcgagcctctgaccagccgagcacctatcgttgagatcgtcttctcgaaggaagagaagaaggctctgctgatggagttcttgaagaaggttgcaggtgtccttaagtcgaagggtatcgcattcactcctgaagaactgactcaggttatcgtcaagaatttccctgacttccgtaagacttggaacctgatccagcgttattcggctaacggttcactcgagattacgagtcagactggtatcaatgatggtgctctgaaagaactgattgattacctaaagggtaagaagtttggcgacatgcgcaagtgggtcgttgatcacctcgacaatgatgcagcatctctgcgtcgcagcctgtatgaaaagatggctgtctttgtcaagcctcagagcattcctcagctggttctgatcatcgcagagtacgactataaggaaggtcacgtcatggacaaggaaatcaacaccgttgcgatgttgactaccatgatggcggacgttgaattcgtataaatatctaggaggtaacaatggcatctatgagtccatttgatatcgcctcgcacatcaacgagaagaaaggtgtgctggatgttgaagaaattggctatagttcgtacgtagtcaacaaggtactgtcgaatacaattgatagtgtcttgttcgcgaatgagatgaatcgttactggggacttccaacccaggcgcaatttgacttctattaccatggtctgccgaagaagaagcgtttcggcaagtggcacaagaatcaggacgacaccgcgtcgctcgatctaattcaggaatactacggatatagtcggaaacgagccaaagatgtgctcggacttcttcgaccttatcttgatgacattcgcaaagaattagaaaaaggtggcaaaaatgtcgcaaaacagaaagcaggaacttcttgagtccttctttgaaattgaacctttgaacaaggatcagtttctaaaggtacgtgaaactttgacccgtattgggttgccgagcaagcgcaatggtgatcagactctttggcagacatgccacgtcttccataagcaaggtcgttactacatcgtccatttcaagcagctgttcctgctcgatggtcgaacagatgtaaccgactttaccgatgaagatgaagatcgtctggagttcatcgtaaacttgcttgagcagtggggtttggtcacatcactggttgaagttgacgccagagttgaatcaaacgtaatgattatcccttatcgcgataagcataagtggagccttcgtgtgaaatactccttgggaaatactgataatggcgagagctaagaaagaagagcaggtcactgacctgggcgcgctggatatgtccagcgtagctgtcatcggacagattgcatcgttcgaagatgacaacgttggcttctatcagaagcgcaacaagaccattcctgattatgcgacagagttctcggcaggctttgacctgagcgttgacattgaagcaggtgacgtaatcaacaagtacgatcatcgtaatcagaaggttgagatcactgctcgtggacaggacaacgctccggcgagactgtatctggagccaggtgatcgtgctctggttccgaccggcttgcacgcggatatcccggaaggctactacatcgcgattcatgcgcgtagtggaacttcctggaagcagggtctgattctgacaaatggcgtcgcagtgattgacgcagactacgtgggcgagatcttcatctcggtcaccaataacagtggcaccagggtagtcctagaagacggtgagcgcattgctcaggggctgctaatgcccgctgtcaaggcacccttcaagaggcttgacactaagccagcacaaaaaactagccgcgcaggtggctttggatcaacagggagcaagtaatgagcgatatcaagttggtatggaccactcacggtcagatcctcggtgaagtcaccgccaagggcgatggttacgaagtagagaatccggtattcatttcgccgggtgggcagggtgtcagcatgctgcctgtgaacatgttctccgatgaaacgaagatcactctgacgaaagaggaccttcgcttcggtggtcacctgttcgagccgatcactgagctgcgcaacgcgtatactcagcagttcggatcagggattcagcttctgagctgagtcggctgaaacgccatatctcgccgagatcagcttgctaacacttgctgatccggcgatgacgcctagataggcaagccagataaactcaagtgatgctgccgctggcgcagtgatattgatgaataggaacgcgatggtcgccacaaaacaggcaacgacgttccagaattttgtagatgacacggtcagggtgcccggctcgtagaacatagagctgaggtcaagtttcctgattgccttgaacaagacataagcaatcattagcatgaagactagtgctgcacatgaggcagcaaacaggaagccgttggttccaatggctagccatgctagaaatgaggagagtaaagacataatggcgttctataccttttgcgattcgattggaagtaagatttaccacaggtatgtggacgatgccggaaaacgccatcaagaaattgttacaagttttcctatcgagctatttatcaaaggcaatggagaatacaagtcgctctatggtgaccgcctcagccgcatgacctttgatacgatttcggatgccaaagacttcatcaagaagtacgaaggtactgtgcctgtctttggacagacttcgatgcatcaccagttcatctctcatcgttaccctgagaagattgaattgcagtttgacaagtatcgcgttctcaacttcgatatcgaaacccgattcgacggtaaggacgatgaagatgaggtgttggttcgtaaggtgttcagtcttgaagaagagaccgtcaccgttggttacatgaagactctccaggacgtttgggaagtctatgatccgatcaacgagcgttggtatcctgcatctaaggcacctcagcgcaatccaggtggcttccctgacgcacagaatgcagcatacgagatcacgtcgatctcctgcaaggtgtttggtcgtcctcagaaggtgaccttcggtacgaaggaatatgaggtcaaggataagaatcagatctacaatctgtgtgcagacgagcgcgagcttctgcagcggttcattgactttgttcgtttggttgacccagatgcaatcactggttggaacattgagtcgttcgacgttccctacatcgtgaatcgctgtcgtgctctgttgggtgagaagctgacgaacaagctgagtccgttccatgctcacactgatcgttgcattcaggactactggattgatgacgacaagactgagaagggatatcgcatcttcggcgtgaccactcttgattacatggacatgtataagggttacaaccctgtcaagcgagacagttacgcactggacttcatctctgaggttgagctgaaagagaagaagctggattactctgagtacggcgacctgatggggctgtatcgtcagaactacgaaaagttcattgattacaacgaacgagacgtttacctcgttgagcgacttgatcagaagaagcagttcgttcgacttgtgatcaccaccgtcttgatgactaagagtcgatatcaggaaaaggacggtaaggtaaagctgtgggacaatctgatctacaatctgctcaaggcagagaacatcgtcattcctccggcagttcagaagcacggtcgtagcatcattggcgcatatgtcaaggagcctgtgcctggcaagtaccgttgggtatcttcgctcgacttgacctcgctgtatccttcgatctgtatgatgttcaacatgagccctgaaactctggttcgtgaagagcaaggtcagctggattgggttgagcgtctgttgaagggcgaagacctggctgcggattgccgagctcagggttgggcgatggcagcaaacggctcggcgtatcgacaggatgtgatgggcgtcatgccgaagggtatgaagttcgtattcgatactcgtaaggctgagaagaatcgaatgctcgaccttaagcgcgagaaggaagcatatcttgcggctggtggcacggaaggctcggaagagtatctgcgtctcgataacctgattgcagcggcagacgcaactcagggtgcgatgaaggttctggctaactcgggttacggtgcatcggcgaacaagggcttccgttacttcaacgtgagcatcgcggaaggcatcacattgaccggtcagctgggcatccagtacatcggcaacatgatgaacaagtacctcaacaagaagtttggtacggagaaggattatgtgatcacatccgacaccgactcggcttacatccagttggagaacctgccttcggatccgaagaacattcagaagtcggttgatgagattgacgagtttctcgagaaggagttcacaccgttcatcaatgcagcatatcagaagctgtctgatcgacttggcgcaaagaagaacctgcttgatatgaagcgagaagcaatcgcagacgtcggcatcttccgaggcaagaagaactatgttctgcgcgtatgggacaacgaacacgttcgttaccatgagccagttctgaagatgaccggtatcgagactgctcgaagcgacaagccgatgatggttcgtaagaagctcgagagtgacctagagatcctcctgacaggaactcaggaacagttgcttacttccattgatagtttcaagaaggagttttataatgctcctattgagaacattgcttcgccgaagggtgtaaaggatctgacgaagtggattggtgacagcggtgaacttttgccgaaggctccatatcacgttcgtgcagcatacgcgcacaacaccttgatcattgagaagggtctgcaaaagactgtcgagagaatcaagaacggcaacaaggtgaggctgatggcgctcaaggcaattaacccttgccgatgcagcaacatcgcattcaatggcactctgcctgaaggtttcgatcttcacgagtacctcgacaaggacaagcaatggaatgctacgtacatcactcctttgaagtccttcactgaaatcctcggatggaagactgaaaaggtcagctctcttgaaagcctattcggctgaggggtttaagtatgagtgcagctagcgagatgttgaaactgttggccagtttgcagaacgaactggtcatggttgacattgacccggaaatggctgagtttgcggaacacgaaaagatccttgatgttttccgacagactgtagcatcaattgaacacatctatcctatggtgcaggctgtcgaagaagtcctcgactggtctatcactccagctctcttctatcacaaatggaagagagcagctgctcacatgggtgtcgatgacgacattggtgaagaagatatcggtccagacgttcgaggactactcgatcggtttagcgacgataatgacgatgaagacgaaggagaagaaagttgagtttggttgataaattgatgaagcagtctacgattaaagagactgcatcgctggagaatagcaccttcttccagaaaaaagaactggtgcagacaaagattcctgtcctcaaccttcttcagtcgggtgagcttgatggtggttttggtcctggtctgaccatctgggcaggtccatccaagcacttcaagaccagctttgtgctgacgaacatgaaggcgttccttgacaagtacaaggatggtgtggttctgttctacgattcggagttcggtactcctcagagttacttctcgtccttcggtattccgctggatcgcgttgttcatactccgattaccaacatcgaggtgctcaagttcgacctgatgcagcagttggatggtctgaaccgtggcgataaggtgttcatcgcgattgactcggttggtaacctggcttccaagaaggaagtagaagacgccctggaaggcaagtcggttgcagacatgacccgcgcaaaggcattcaagtctctgttccgtatggtcactccggtgctgtcccttaagggtctctgtatgcacgtcgtggctcacacctacgatacgatggagatgtatgcgaagaaggtcgtgtccggtggtacaggtcttatctactcggcagacaacatctatatcgttggtcgtcagcagaacaaggatggtcaggaagtcgttggttacaacttcgttctgaacgttgagaagtctcgctatgtccgagagaagagcaagattccggtcgaggtaacgttcgagaacggtatttcgccttggtctggtctgctcgaccttgcacttgaaaccggtcacgttgtgaagccatccaatggttggtaccaacaggctggcactgaaaagaagctccgtcttgctgatacgaacaatgctgcattctgggttccgatccttaccaagacagactttggtgcaaagctcaaggaacacttccagcttgctcagactgaaatgatcaaggctggaacgatcgattacgaaactggcgaagtgattgaagaataatggttaagaaggttctaccaacaacgacgaactggctctatgctaaggagcctatgctcggagcgccaaccattgcgaacatcacgcaatggttgcgtaagaacaagctgacggttgtccaaaaaggtcgtcgtttgacagtgaaccatcgagccaacgtagagcctgtccgcctcgctgacgaaattcagttgaggctggaaggctctcgtcgaatctcaaaccttgctgtgaacgtcaatggtattgctatcgtcgtatcggctagcctgaaaggtaacgctggtgaggacaatgaagaatacttgatgcaccgtgtcaatcgactcgtcggttggctcggtggacctgttgacgtgaccttcaaatcaaagaagaaagcgtttgagatcaaaggtgttgttgaagtctatctgtcaggacgcgatacgtctggacataagaaagccgacgttgagttttggactaagagcgggaagatgattcctgtatcattgaagcaaggcaacgcttcattcttctcttcggctgactcggagctcaaggaaattgctgaggcttcggtgcgatacgcatttgagaacgccttgaccaattttgaaatggatcctgcaacaaagatcaggaagatcaaccctgaccttgtgattgaacctacagataaggaaaaggaatttgcccttttcggaaatgacatcttgaaaggtaaaggtgctatcattagacagtcattcaccatgaatgatttcttccaagatgtgcccaacaagctgttcattcacgtcgaagacatctggcaagaacttcgtgatgtgccagagattgaacagcctgtaattcagatcagaaacgacaaagatagaaaccgaagccacccactgctcaaaggtctacgtgcgctgacaatcaaacgtgctgtagttcctaagaatgctagatggatcgaccgtgagaaactaaaataatggaactctacgtaaaagaagcccgcgaagactaccttgaagtcatcgacttgaaacacccgcagtaccttttcatcttcgatggcattcatgttgggaccaacaatggcaagctagaggtccttgtaaataaagcgtcggtacagaaatccgacaaagcggaagagtctaaccccgatgcaattgtcgcggatgaagatgaattccttagtacacataccgaactaatcatcaacgaactgttccgtggtccagttgaaacggcacttggttgatattatcatataggaaatcgtaaaggaaagtaacatgcagaaagaaaaaaccaatccagaactcggtcagcgcgttcacaagcacctcgtcagcctcggcattgaaacgccaatcactgagctggtgaatgtcccgagcaaagagaagatcgcgaagatcgaagagttccagcgccagtcgttgctcactctgggtcttgatctgaccgacgactctctgatcgaaactccgaagcgcatcgcaaagatgtacgttgaggaactgttctacggtctggattacaacaacttcccgaagtgcacagaagttgataacaagattgaatacgatgagatggtgattgagcgttgctcggtcaagtctgtctgtgaacatcacctcgtctactttggtactgctcaccgtcccgatctgtcttgctgggtgtcttacatgccaggtgagaaggttctgggtctgtcgaagctgtctcgcatcgtagacttcttcagccgtcgtccacagattcaggaacgcctgactgtgcagattgctgagaccatcaagttcatcactggcacggaagacgttgctgttgtgatgaagggtcagcacttctgcgtactgactcgtggtgttgaggattccgatggcgtgaccatcacctctagcctgagtggttcgttccgtaccgatcctacgctgcgatcggaaatgatgtctttgatcaagggttgatatgagcgagcacctgaaagaacttgaaagagtagccattgaaaggctggttgagtacggtgatcctaagggtgtgtatgttgcgacgagcggcggaaaggattccgtcgtcgtccatcatctggctcgaaaggtgttcggtgatcaggttcatttgattcacacacctaaggtgaccggtttcaacaaggtacatcctgcgactgtagcattcctctatgagcagagtgcgaaatatggtctcaacatcgttccatttgaacgtatgcaggagtatctggataccaacaagctttggatccaaattgacggcactcgccgttccgagtttgatcggaccgatcgcagtgcagacgtcgtagtgaatggtaagttgatcagccgagcggacatgcctgttcatacggttggcggcttgtttggcaatgaatcaattttccctattgtggattggagtgatgatgatgtatgggcatatattggacagcaaggtattgaagtcaccgaggaatatcgtattctcgccacacgttgatgatgaagtgatcgggtgctttgaagcgcttgatcgaggtctgatcacagacgttgtctacttccacgatgtcactcctgagcgtaagatcgaagctctgaaaactgctgagatgtttggcttcactccgcatttctgtgattatgattggtacggtcttccgaaggaaatcgacaacatcaaatcctatgatacgatcttctgtccgaccattcgtgattcgcattctcagcacgctgagattagcatcagagctcgaatcgtcagcaggaacactggttgtaagttggtgttctacacggtggatatggattcgttccaggcaccgcttcctccgaaggttcgggcaaagaagaagtctgtccttcaggaactgttcccttcgcagagtattttgctgacgaatgagaagtatcatctgttcgaaggttatagtgagactgatcactacgaaggcatcgagttcaagattgacgatgagcgaaaggtagtgatgaagggttatcgggtgccttcagtcctcgaagcgccttgggatgattcaatcaaggacgcggactacctcaacatcctgatcactcggtatttcaatcggatggcggttagttacatcgcatttcacaatggcaataggtgggtagaatttaatggctaagattggtattgaagtagaaggcatgctgcgcggagagaacgttcgcacttatttctgttcggcaaaagaatacgtcgaggcagatcttctcaatctcatctacaatctgtatgtgaatagtattgagatgatctacatttcggatcatcacaacgagcttgacctgcatcacctcgcagaagtgttcaatgatagtggcatcggtgtcactgttgaactgaccgagttgaattcggttccgcctgcaggtgttgagatcttctggaatgtttcgcaggcttcttatgctcagtctcgtactctgcatttcctgcgtccaacggatcagatcaagatcgagaatgagaaacacgttcttgcattcgttgcaggcaatgcggtaatcacttatcctgaggactttaatggagacattgaagtatgagtgaagatttcatgagtggtatgatcgaccagattccggaacaggcaaagcgaaatctgttcatcattccgattgagcctctggaagagagatacactggcgagtggtacaagttcctgccacctgcctttgccaagcacaatttcaaggtcacccagattgatggcgagactctgaccgattcggttgagactggcgcattcctggatatgaactcgactatcttctacaaggcatctcagatgcagaagattgctcgtatgttccgtgagaagagcattccgaatggttcggtcttctttgtcagtgacttggaattctggggcattgaatctctgcgcctgatggcacagatcaacaaggtcgagatcaagatctatggcttcctgcatgcggcttcgtacaccactgaagatgcattcgcagttgcagcgccatatcagaagtacactgagctgggctggctgaaagctgttgatggcgtctttgtcggttcgcactatcacaagaaggcagtgatggaacgtcgtgtgaacgcgttcgcgaacgaagctgaccgtcgtgagattgagaagaagatccacgtgagtggcaatccactcttcccgagcgcatatgacacgacttcggttggtccgaagaagaacaagatcgtgatcaccaaccgattcgattctgagaagcgcccggatcagagtttgctggttgcactccttgtcaaggaagcactgcctgatacagagattgttctgacgaccagtcgtccgactttccgctcgaatcagaagtggttggttgacctcgctcgcatgtacgagaaacaaggtctgatcaccatcaaggaaggattgaccaagaaagagtatcacgacgagctcaagactgcgaaggtcatgatctcaaactctatcgaggaaaacttcggttactgcattgtagaggctatcatgtatgacgtggcgcctgtactgactcgaggtctttcgcacgttgaaattgttcagggctttgaccagttcctgttcgacaccaacgacgaagcagtaagtaaggttatcacattcctgcaacgcgatcagcttctcaacgcgaagcacttcttggattcttactttatggctgctgacttcatgggtcagatcatggcccaaggatgatatgacagataactacaacggaaacgaactccactacattgcaagcggaacgtctttcatgtacatcaactcactccgtcgagatggcggagtgaatgatgaaacgattgattgggtacgcaacatgttcgtaggagcagatcgtggacctaacaaattcggcatgctgttcaacgcgttcactgaatcgaccttcggtaaggtgttcaaggagaactatgctgacgtaatgtgcgacattcacgcagactcaggtggtctgcagatggtgtcgcttggcaaggttgctgatgatgcagctaagcgcaagatctacaagactcaggctgattacagcactgtagcaatgtcgttcgacgaaatccctgtctcgcagatctttgatccgtatgctggacgtggtgcaatgtcggcgacgcgtaagaaggtcttcgatcgctctcagctgaaagctaaggcaattgaatcaggaaagaatctacgtgaacagcttgaatactttgcggaagtcgggacgatcgctaagcctatgcttattgctcaaggcaattgtccagagacctattatgactgggttgagtacgtccaggatcagatccctcatgagctcatggacaatatcgcaggcgttgcagtcgcaacctcgacgcttggtcctggagatctagagaactacgaatcggcgtttgttgcttcgcagatgaatttccgttttgactgcaagcaaatccacttcctgggtgttggttcgtttgatcgtcttgctcctgttctggcactagctaagtcaggcgtctacaagaacaagatcatcagctacgacagcactactcacacaggtgggcttgctcgttcacgattctacacacgacgtcctgacggcacctatgttggaactcgtctgttgcaatcggatggatatcgcccccgtgattatcagttcatgatggatcacattggcaagttcaacatcggcttcgatgatccggaatcgctctacaagtatttcatcacttgcccgagctattctgccgttgaggcaattggtgagtcgcacaatcgaccattcattccaaagacaaagattgctctgttccgatattcgtacgataacttcatcacacagattgaagagtacatggattcggatggatacatgaagggcattcgtaaggcgcaccagcatcctatcgcaggtcttgctgaatgtcgcactcgttccgacttcaatgtctggcactcgacgttcaagaacgtgttgaagtcggacagagttcgatcgaagcaacagagcctcgaagagcttttcggttaaagacatagcatccgttgattcaccgtcacggatgctatatcatagttggaccatttaggagaaccattagatgaaaaagatttgggtaacattccggaaggcaggctttcaccgctacccagcagccggcacccaaggactcgaagacgtcgcgtaccttgcacaccctcaccgccacctgttccacttcaaggtagccattgaggtcttccatgacgatcgtgagatcgagttccaccagttcctcaacttcttggaagaggctgttgcactcaacggtcttgattacaagtcgtgtgagatgattgcagatgatattgcaaagattgttgctttgaagtatcctgcactctaccgaacccttgaggttgaagtttcagaagatggcgagtgcggcgttcatgcaatctatggcatcagcaatggcgaggtattcggctaatggcactgttcgaagtatcggaaatcttcagctcgttggagggtgaggcacaattcactttccatccgaccacctacattcgttttgcacgatgcaacttctcttgtccgttgttcaacaaccctgagaagctgattgatgcaaagggctacgcgcctctcgatttcgatccgaaggactatcaacgtctggaagatattccgctgattcacaaaggctgcgatagtcagtatgcagtcaatccgatcttcgcgcacatgtggaagaagtacgacacggacgcattgattgatgctctgttcgaggttcttcctcagggtaagctcatctacagcactggtctgcctcagatcatctctttgactggaggtgagcctactttgaagtggaagttcattcctgagattctgttccatcctcgaatgaaagatgcacgtcactatcttgttgagacgaactgctctgttccgttcaaggacgaattcatcagcaacatctacgagtggcttgcacaagactcgcgccgcatttggacatggagcaattctccgaagatctcgtccagtggtgaggatcgtaagcaagcgattcgccctgagattgctcttatgcagcacgttttgacgcacaacttcccggggcgtgtcaatcagtatttcaagttcgtcgttgatggatctgaggctgattacgctgaggtgaaggaagtgatggagatctactacgctgctggtctgcctcgaactgttccgatctggatcatgcctcaggcttgcactgacgaacagcagaaggttacggcgcgcggcattgctaagcgatgcattgatgaaggttggttgtactcgcaccgtgtgcagaatgatctgtggggcaatggcgttggcacctaagatgctaacgtatcacgaatggatggttgcccacaaatactggggcaactatcacgccgagtacggcaaatactgtgctaagtggagaagagataatgaagatcagaatcgaatggacaagcgatagcagtgattgcgaaacctgtggttgtaactttgccgacggtgcgaacgtctacattgatgaagtccttgcactagagttcattcctattgctcactgctacgatggagacgatttcactcgtgattacgtgtatgcgcaaattcttaagcatcttgggcatgaggtcatcgagggatgaacgagattccgatctcagctgcacagcacgtagcgaagaagtatggtttcgaccagatcataattattggacgtaaggtcggctcccacgagcacgtcacgacttacggcgttgacaaagagaactgcgacgcagcagctcttgcaggtgatcatttgaaatacaacgtgatgggttggccaagaccatgaacgatgagaatcgttggactgtgtctggcaactggtatcattggaagtggcggcgcctagcgttcgccccgacctgttgggacaaaggcatcggagattccgatggcgagtggttctacattggtatgggcttctacttcctcatcgtcgacctaagacaaggaggattactatgaaactatttcttaagagctatgatggcggcggagattccggcgtcacaggctattggttgattgagtgcaagtctttgttctcaatcgtattgcttcactttgaaggcaagagtcgcgaggcattccattctcacgcattcaatgctctgacttggtggctcaagggagccgtaaccgaggagatgaaggatggtcgaatcagaacttggtggccttcttggaaaccaaagtggacgccgaagaactgcttccacaagattcatgctgatcctaaaggcgcctgggcactaagcattcgtggtccatgggatgcaacctggtttgaatctaagaacggtgaaacctatgaattaggtcatggtcgtgtcagaattaatggtctagttgagcaggattccgaatgagtgaagtaacaaatgagcgccttgttctctcggcgctggtaaagaatgaagagtatatgcgcaagattcttcccttcgtaaaggaagaatactttgaggacgagtcggagaagcgcgtcttcaagatgatcaatgcctacgcgggcaagtacaatgagatgcccgacaaatcgactctgatggttgaggcaaagaatgatcgcagtcttgatgaaggtcgtagtgctcgagtaattgaaacagtcgcagacgttttcagcatcatccctagccagaacttcgattggttgaagcagatcacggaaacctggtgtcaggaacgagcagtctacaatgctctgcaggaaggcatcgcagtctatcagggtgagaacacaaaactctcgattgcagcgattccagacatccttgcaaaggcgatcagtgtcacgttcaacacacaggttggtcaagactacttcgatgacgctcagctgcgatgggacttctacaccaatcctgagtcgaaggttccgttccgaattgatacgttcaatgagatcacttcgggtggtctgactcgcaagacgctgaacctgttcgttgcaggtaccaacgttggtaagtctctggcactggtcagcctggctgcggattacattcgcgatggcctgaacgtgctctatgtgtcttgcgaaatgcgagaggaagttgtgttccagcgagtggacgcgaacatcctcggcatggatatgaacaagatcactgacattggtcaggagaagttcctcaatcgcatcgagtctctgaaatcgaagtcgtacggcaagctgaaggtcaaggagttcccaccgacctcagcatcaacgttgaacattcgacagacgcttgacgaactgaagatgaagcaaaacttcattccagacgtcatcattgttgactacctgcagattctcgcatcgtatcgtttggcttattcggttggctcctactacttcttcaagtcggtggcagaagagcttcgcgctctggctgttgagaccaacaccgttgtgtggtcggctgcgcagtttaaccgtggacagatgaacgcgacggacgttgacatgagcggtatcgcagagtcggcaggtatcgctcacacggctgacggtatgtgggcaatgatcagaacggatgaactggatcaggtgaatcagcttttgattaagcagctgaaatctcgatatgcgaacaagtcgatcaagaccacgttcacaatcggtgtaaagatcgagcatcagacactctatggactggacgatgacaggtcaggtgagttcactcaaatggactcgaagattgtcacagaccagaactcgctgaaggacaagttccaaagcgccaatggcggaagcaaattccaaggatttgaagtgtgatgaaagacatttggccagaactagtcaaggaatacgagcctctcattggggctctgtatcgatgtaatgaacacacctacaccttcttcggattggtgcacggtggtgacgactattactatggcatgtggcaacatggaacaggcaagtgtgagctcttgtcctgtgtaggtgcgcccgaatccttcggatacttccgaacacgaaacgcgacgagacacaaccgagtcggctacgctgaaatctgagccgaccgcagtcctatgtccgccagactggcccagcttttaaaagcgtatccagtaagttcctgattctgttgatattcttgacgggaagccctgctcagaaccaccaatagaatcagacacttacaagcctagtactgctaaggggtgtgccaggctcgagccagatgaccactcaaggtgacaccccggtttcccagggtgtcgagtggcctgcattgtcagatgtcagtccactatcagaatcccttgatcagggtcgtgtccgccatgtccttccagtcagcggcagaggtcttcatgaaaccggcgagctggttcaccgtacggatcgagaccgaccgcaggctcatcaagttgtcgttcatccacttgacgcactggtcgacctgcttctgatccagaccgaggtctgcacctagggtcgattccttgaggacctgctcgacacgaaccatgatggccttcgggttatggatgcacaggtccaggaagatcgaccgactcatgagagccagaatgtgcggagccagtcgaccttgcttggcgacgatgcgatccaggtcgaggttggtgatgaagacgatctgaccttcgtactggaatcggttcgggatatcgctgtctgcgaggtacttcgatgccttcgaccagctgatggtccgaaccgcactcgtgtccagcgctgccttcagaatgttcagtgcttcttcgtcgtagaacacgcgatccacgtcgtcgagcagcagcacctggcccttacctcggttcttatagagcgtctcgtagagaccgacggcgctgatcgtgcccttggtcgagtcgtaggacttgatcttcttggtgcgctctgcttcttccaactggcgctccaaagtgaaggtcttaccgacacctgccgaacccgacacgatcaacgaacgaatgttgccgttgaccatgccctgcccgagcttctcgagcatgttgaatcgcttgcggatcatcgcagcatcaacgggcttctcaggaacctcgacggcgctgtcatcgtcatcgtcgtcatccgaagcagttgcctgagccaagccggctgctgtaattgcccaaagaccacgaccgatcttttccagctcgccctctttagcgcgcttcaaatactctcggttgaactgaccaagttgacccgtcgtaacggtgtcgccaaacttcattctcagttctttcttcatcgtagcggtggtgctcatgatccagttccttaaagtggttttgcctgacatctgacaaccacaattatacggatttcttccccaggaacaacctacgtaagtgtctgattctgttggaaaagccaaagctaccaaggattcttcggtacacaatcgaaggattctgtgccgttctggctcgatccactagaattggacgacataaaaagtgaggcaattcgtcatgggtggcaatgcagttttcaatgatctttcggctcagccggtctctatcgtctgtcaagatagcagggatttctggagagcgaaaattgagcatctcatgctcacaatcaatcacgtcgcacgtcgaaccctctgggatatgagtgcaggcgccaagccttatcttgcaggctcaaccaagttcatcttcgatgacttcatccctacagctgagcttgtcaagtacaagaattccttcggtgacattgacattcaaattgatgttgagaagggagccgacttgatgtctgtcctcaatcttattagcgcaaatgaatgtgcaaatgagttccagattgtcgggtggcagcacacagtagacacaatcgtgaccatgtggtacgatgaagatgtgcagcagacgttccaagttgattttgagctcgtcgaattcgtcaacaatcgcccgacgaactggtctagattcagtcgatcgagttcctgggaagacacctgcgccggaatcaagggatttgctcacaagtacatcttccgtgcgatcactgctatctggcttcgtgaagcgcaggtccagctcaagacaaagttcgtcacaaaaaatatcagccctatcgtgttcagcccgaagggtgctcgagtgaagtggcgagagattcgtccggacgtctggcaagagattcctatggacgaggaagctctaatcaagaacgtcgaagacctgttcaagctattcttcaaggtcaagccagatgccgagtcaacctgtgagatgtattcttatcagggcgtcgtcaatctgatcctcacctggattgacaaggaagatcatcttaagatcgccgcaggtatgcgcaatcttctttggggtccgtatgctcagaagctgtaccgagacaatcctgcacgagacttctatgaaaagggtcaggcttatttgtatctgacagagactctgggaatcccggtcgagcccttcttcggatcggagaaatactatgagacgtattgatggcgttcttcaagacgattgatttcctcaaaagaaacaacgcggctattcttatcaacatcgtcttggcaaaggacgtcatgacgattggtaagaaggtcgacggtgaaagagttgtggttgaggctttgatgctcggtgacaagccatccgagagtgaggaagagctgacccaatattgtctcacagtgaaaggttcacctccagcactctgggcactcgacaattggttccctgtgacacggttcttcaaggatcccaggttcgttccaaagtcaaccatcaagggaacacctgaggtacgtgataaggagttccagcagaggcaagagaagtcattggttgacgtcatcaacaagtggagtcaaccgatcaagctggaaaacttccacatcaaacgagccgaacaggctcctgagattggaccacacggaaaagagaacctagttgatgtcgtggtatgggacgaacacaatttttcgtataatgtgagctgtaagatgtctaaggcagctgaccttggctccggtggcattgctggattgcagaagtcggttcctgagttggtgaccaaactctactatcaagtcaagattgatctgtatgagttaggtttcgaggaagggaaggtgtacgatattcgtaacatcccgactgtgatgtacggtattccggacatctacgcgtacaagatgttcgccggatcagatgaggttggtggcaagattgatttcatctacgttggacccgatcaggttgactacaatggtgaggagttcaacggcaagttctggccagtggaagagtatgctaagaagaagccatactacctgcggctgagaaagagagacgttcatgcgaacatggttcgtatcaacttcactaagctcaactcacacggacttccttgcattttcacaacaggattgggcgactttgcagcagcccgtttcgtaattgatgatagagtgccacctaaggcaactgtgaggcaactatgctagtagcagagaagaagcggaagaacatgaaacacttccgcgaaatgaatgatagagtgttctgtgaatggatccttggatatgaagtcgatcagattgatctgagttggaagctcgacggattcttcctcaggttcggaaaggacaaagagaacaaaccttggttccagactgcacgctcgcctgtgctctatgatccgatggagatcatctggcactcgcttgagaaaggctatgatcacactggcatgagccgtgctgaggtctacttccatctcatcaagaccatctgggattcgaacatcatgaatcacttgccagaagactctggcttcgagtgtgaagtgttcgacaagtcgatgtctgtcttgaacaaggagaacaacaccagaacgttcgtgaacattccgtacgacgaagagttctttaagacagatctcacgttggctatctacaagctcattgaggcagcaacagctgagacatggattgatgggtactactgtgacctgaaactagacgacaacatccagacattcggcactcgtttcaagattgacttcaccgcgaaatactatttcgagtgtggtgtcaaaggcatcacaggcaacggaaagcttcttcctattctggaatctcgccgacaggcagatagagaaaccaaacttggaatgaaggcagtgatcgcaacactcaaagatcaattctgttactatgtcttgaagcaggctcaagaccatcacaagatgggaaagaatttcgaaggggttgtcatcaccgtaaataagacagagtacaaaattgtcacagactacttccgagacttgatctacttcaagggagtgatgggtggctaattttgacttgttcttcggaaggttccagccggttcacagtggacaccttgctgttctcgagaggatgaacaaccctgttgtcgtcatcgtcaaaggaaaggtgtcatcgaaggacacggagaagaaccctttcgactttgcctatcagaagatgcttctagagaaggtgaagcctgatgttagggtgttccagtcagagactggatatctcccggacattatcaagatgcttggtgattgtcctgatgctgtctactgcggtcccgatcgcattggacagtacaaggcgcagatggaacgcgccaacaaagagcttgatgagccgtgtctcgtcaggttcattgaaacggagcgtgtgacatctgcttccgttgttcgtgaggccatccggtctggcgatagaaaagcctttaaggccaatgtccctagagcaatctgggatcagtactcaacaatgaaaaagaggttagaaaatggttgacttgacagtaactattccgtcgttcgaagacttcctggcagaagatgcaaaggcaatctcggatgcaaatcatcacaggaagaatggcgacggcgaaggctgcgacttgaagcctgttgtttcggacaagggctcgaccactccagaagtgattgagaagtcggacaatgctgcacctggcgacgacaatggcgaaactctgcctaagccaccggtgagctaagatgagcgaaggcgccaacgtaactgcaggtgtggcgaatccagacaacgtcatgccacccgagaagccacagaagcggaagggagaaggagagttcgcaaaggaaatcaatgcggctgtctcacaggctggtaagaagctggtagagtctctgttggaagcgaaggcgcctaagcaatttggcttgggcgacaaagtaaaactcaacggcaagcctgggcgaatcacttcggttgtcagcacgacagctgaagatggaaatccggggactcactggaaggtctctatcaggtacgaagatggcaaggaaaagacttacatgtctaaccgtgccaagatcgttgtggtagagaagcaccctcagtacaacaagcaagcagaatggcatcaaaaggatgctatggcagctaagcgtggtgcagactacactcgtcaccactctgagatggccaagtaccatgataccatggtcaagcatcacgactacgaaggcaacactgaagaagcagacaagcaccgcgcagcagccgtgacgcatcgtgctgaatctgagaagcgtgctaaggaagccgcagcaggcggaggctttgtaaccaagcgtgagatgcagtccaagcaacagcaagcctatcgtaaccatgtagctgacgaacgcgaaaagaagcgccagtgggaagaagctcgtaagacagccgcggctaatcgcaagtcctacaagcactactactctgttcctttcgctgacaaggatgaagctaagtcgaagggattcaagtgggatccaaacgagaagaagtggtacgttacttctcaattcccgaagccaggcacaatgaagtggaaggcttcgcactccgtcgatgaaaagacaggaaagaaagtcgatgattgatttcgatacatggttgtacgaagatctcaaagttcccaacgccaaggatggcaaagggaaaatgcgtcatggtatgccacagcttacgcagtttgatgcgttcatggcagacctaaaagacaacgacattagcacagaggtcaagtctttgagcccatggaagttgacgcctactcaaggcaacttcaatgaggagaaggttgactacctgatctcgagtgctaagtgggaagcgaagcctataattacaagtgccgacaactatgtcgtagatgggcatcatcgctggttggcggcagcaaagttcgggaagaagattcaatcgagagtcattggcatggattgcgatgacctgttgaagttcctcaagggcaaatcctatgttgaaacaaagacaattaacgagtgatattaatggcgcttcgaacccctgcaccaattagattttctctggagattccagagctaaacaagacgatctcttatcgcgcccttaaggtcggtgagcagaagtctctgttgactgttcttgagctgaaggatgcttcggcgatcatcaacacgattgtagacatcattgatggcattacgtttggcgagcttgatcttgctaagacgcctatgcatctcattgatttcatcttcctgcacgcatacatcaagtcgtcaggtgctcgctcaaaggctgagtacacctgtggtggcgagatcgaagtagaagaggaagtcgagatcgaggaaggcaagaaggaaattgtcaccaagactgttccttgtggatccaggcacgaactgctcctcaatctcgagaatgccacgattaaatatccagaaggatataaggcttctaaactggtacagatcgatgactcgatgtctatcaaactgaagatgcctgacttcgccagcttcaagaagctcgacctagacgcagacgtcattggtatctcagaccagtacatcttctctggcattgagtacattcttgatggcgagaacatgtctgtcccgggtgcggatttcgacttcgatgaaatgacgacttggctcaacgaactgccttccacggcgcttgatcagatcacggaattcttcgaaggcgttcctgtcctgtcccttaatgtggacgtgacttgccctaagtgcggcaggaaggatggtttcgagcttcaagggctcgacgattttttcctgtaatctatccagctaacaagctagtagacatgttagaactgaggcacctactagtaacagaacacggatatcgtctggatgaactggatgatatgcctttgttcgagattgaaatgacctctttgattgcagttgaaacccagaaaagaaagatgaatcaattaggttaaggtaaaatgcttccagcacttctaagaacagttggttcttcattgttgagatcagaggcggttagtgcaggtgctaaccgccttgtcgtcgcttcgagactcaacaaggtcgcaggtaacaagctagtccaaggacttgcgaaacactctggagcttccaaagttccggcgctggacaagattggtagttatcttagcaaggttccttcaggaaaagagaaggaaaagaaagaacgtggtacatccacttcttcatcttctaagaaccgtgataaggcccgtgatgatgctgccaagaatcaagagcgtcaagacaaggctgagaaggaatccctaggtgtacaggaagagaatgcaagccttctaaaggtcattgcaaaggacactgtacgcgtccgtgatgcggtcgaggccctggctaagaacggtgtcggtggaggcgcgggcggtgatggaatgatggacaagctgctcaagaccatcacttctctaccagcactgctcccttctcttctcactggtcctgcgggcaaacttggcggctttgtaaccaagtttgcatctaagattcctggcgttggaagactcatggggtcaatcggaggcatgggtaaggcaggcgaagctgcaacgactgtagctcgtgcgggtgtagctgcggaagcaactgcggcaagagcaggagccgctgctgttggacgacatgctctccgcgatcccaagacaggtcgattcattgcacgtagcgcagtacaagccgccgaggttgctccaaagggcattctggctaaggctggtgcagctgctgcgggtgttggtggtgcaaagattgcaggtaaggcaacaggcgcaattggtaagggcatcgcaaagacggcaggtaagtctctactcaagaagattcctatcattggtgcaatcgcaggtcttggtctggcagcaaaccgagcatacgcgggtgactggacaggtgcaggactcgaagcagcttctggtcttgcaggaactattcctggtattggtacagctgcaagtcttggtcttgacgcggctatcctcgcgcgcgaccttaagaatgacggaagttcgacacctgctgtaaccgcagcagccaagccagttactgcatccaagcctccggtgcacacggctgcaattgcagctgctccagtggtagcgcaacgcaaaaccgcggcagcgactgactccatgcaggtcactatggcgaagatgcttgatgtgatgactgaccgctccaagggcatctacatcgttcctgctgaggttggagcatccactcttcagactcgctcgccttataaccctcagggtgttccaacaggaaacaaatacgagccaatcgtcagtgcaagtccatatgattcagcaccaagcagcatcggtcccgctacggcaggtcgtacaatgggtgagggaacatccgtaacctccggtcagacaatgcgaggcggtcgtgttgagattggtccaacgggaaactttgaacgagatcttctcaatcagattgcagcaggtgaggcaggtaaggaaggctacgactcggtatggagtggttctcgtgtcaagccaaccaagcctgtgtctcagatgacattcggcgaagtgatgcagtggcagcgtgatacgctcaacgaacaaaagagccgaggcatcccagcaaatcgtcgtagttctgcagtaggacgttaccagttcatcagtagtacactcaaggcgcagatggctgcggcaggatttaaggaagatgatctgttcaatactgagaatcaggataagctcgctcttactctgatgaaccagggtggcaaccttgacaagttcaagtcgggcagaatctcagcggagaagttccaagattacattgcatcacagtgggcatcacaaaagacagcaagcggagcaggcatgtataatgctgcaggcttcaaccatgcaggtcacagctcacttggattcttgaaggcagctcaagcgtcaggttctctgacggcatcctcaggttctccaactgcaatggtaagagatgctgcacagcagaagcaagccgcacgtatggcgccgatcgttgtcagcgctcctacacaggtcgttcaaaacgggcaaaaggaagccgctgctccaagaacaacggcttcggcaacacctgtcattgtgcgtaatccggactcgccggttcgctcctacgtactatcgcaaatcaggacttcttgagcttcttcttgagctcttgaatctcatcgtagtacttctgagactgggacgtcaattcggcgttccagactttgcattggttgagtcggtcaagatagagttgagactctcctgcgaaactccaaagaaattggctagtttgtggagaaagtagttctcctgtgttggtgttggatccgttactgccgctggtgcttccttgaccaccggtggatccggaattaccacttgctgatgggtcgcgcaggcggataccagcaagcttagacacagcagcatcgagagaagcagtgcgcgccacataggctttgtcgagttcattctttttgtccttgagactggtttcaaatgtcaatttgagattagcagatgcgccttcagccgtagccaccttggtcgccatttcggcaacctcggctttgtgcgtagcttgaatggcatcaatttgtagacccttgacataccagattgagcctgcgccaccacctacacccagtacgagtgcgatgccgatgccccaaaggaatgtctgggtattcaatgcgagtttgcttagcattataggtgccccagattgtaacgattagtgacgtcctttaggatatcgacaacaattcgatttggccagacgtcggcgccaatcgaccaatcatattgatgcaagaacatgagaatagcttttgcgacactgaattgaacatcattcaggagcactcgacagatagctgttaccttctttggtccaaagacatttaaagtgacaaccatattattgatcagcaacttctcattgatttgaccggtctttagaaaccggtcaatcatcttccttgtagtcatgaagacagcaaagtctttgtcaaaagtcttggcatggaagacgcctttaccataaccaccaagggcgatctctttcgccaagtctttcacatcactcatctgggggaccttactcggcagccttcttgttgttcttcttgctggtctttgatgttgtcttagcagccttaggcttggtctcttcgacttccttggcaacttcctcgaccgacttggtctcttccttgattgcctgaccctgctcttcgctgataatagcaatggcttcaacttcaccagcatcatctagctttgcgatagcaccaatcggagcatcttcaaggacagcttcgattacatcaacagcttcttccttggcaaaatcgccagtctctacagaaaatgcatctgccttgatagcagcaatctcatcttcgctcagttcacggctccctgccggcacgatcatatcctgcaaatcttcaagagaatgcgtgcgctttgaccaaaccactgcgtcgggcaatccacgaatcgacacgacgagctcgccagtgcttgggttgacccatccgaggtgagtagcaactgcacccttcacgacttctttagttctatctaccatcttgtttcacctttaattggacgaatgcacggcaccgcattaaaatagatcacatgaactatctagatttgaaatacacgaggctcgtgtcaagttatttacctgggtggaaggaggtaagtgcaaccttgtctcgttttcgttgcccgttctgcggcgactcgcagaagtcggaatcgaagactcgtggatacttctatcagattgaaggcaatgcgaatttcaagtgtcacaactgtggcgcttcgatgggcttgtattctttcctgaaagaggtagcaccagtactggcgaaagagtacacctttgagaaattcaagggagtcaaggcgttcgagactgatccttttgagaagttcatctcgaagccaaagtttgcagacaagactctcttggatgattgtcaggctatctcaactctggaggacgaccataaagcaaaagactacatcaagggtagattgattccggaaaagttcttcggtgatctctactactgcaaagatattcgtttgattgcagacaggcttgatgactatcgagaccgagaactgcctcgtagtgattgcatcatcattccgttctacaatgaagcgaaggaactggtctacatgcaggctcgtttctttggtgacgtttcgatcaggtacatcacactccagattgatccgaacgcaaagaagctgtggggccttgacagggtagattggagcaagaaggtctacgtctgtgaaggaccgttcgacgcgatgtttgttgagaactgtatcgcagtcgcaggcgcaagtatcatgtctgaaattaaatacctgcgagaacatgctaaaaaagaccttgtcttgatcttcgacaaagactatcagacaaatccagaggtgtatgggcaattcctcaaagcggtcaatcaaggcatcaaggtcatcatgttcgatccgcagttcgctgctaaagacatcaacgcccaggtacaacatggaacaagtattccagacctacagaaatatcttgagaaacggactttctctgggctcggtgccaagctcgagcttacgaaagttagacgtccactcaagagaaaataatggcacgtaaacctcacaagtcgccaaagacatcgcagcatgatccactcttcgacaacttcaacctcgaagcaaagggatcaggtactcaagccgaagcacgccttgactgggaggcaggaaagaatcttgtcctgaccggttatgcaggcacaggtaagacgtatcttgcgctcgccctagcactccaggccatgatggcaggagaggtccgacacattcacatcgtccgctccgcagtttcttcgcgagacattggtcaccttcctggtaccgaagcacagaaactcgaagtctacgaaagagctatcaagtcaaacttcaacaagatcttgaagcgtgctgatgcctacgaatgtctcaagctgaagggcgccgttagttttggatctacttcctttgaaaggggtgtgacatatgacaaaacctgtatcattgtagatgagtttcagaacgcctcattcgcagaacttgatacggtagtaacgcgtctaggtaatgactccagaatcatcttctgtggtgacactcgacagacagatttgtctcctggtaagagtggattccataggtttgttcgaatcgcagatgcttgcggaaagttcttcattcgccatgagtttggtatcgaagacatcgtaagaagcggtttggtcaaggcatggatcatcgcagccgaagatgatgcaatcaagaacaacccaacctgagaaatgaaatgattatcactgatgatgtaatgacctcgctgtccgataccgatctgtctgaaggcactacgagcgcagcgaacctgtatgctcaggcgctgtatcgtgatctggttcgtcaggcactcgctcgtaagagtaagcacaatactgctcgcgccctccgtggtcgtgctcgtattgccaagcgcaaggctaagcggaagtcgtaacatatgagcagcaagaaccgtcgtgacgaaaccaacgtcgaccacttcgcttctagtaaagaccgccgtgccgagaggaggtcgaaagatctcctccggcgggcgcatgatgtggatgaagactgggacgagtatgaactagactctcgcgagattcaccgcaaacgaaatcaacgaatggattaatcatgatcgttattgatatgtcgaaccttgtgttctcacaggttctcgacttccatcttaagaccaaagaacaggttgacatgcccgtcgtgcgcaatctgtgtatcgacaagatgaagtcgcacaaagcaaaactcggtaaggagttcggaccggagattgttctggcgttcgactctaagcattattggcgtaaagacatcttcccttactacaagggtaagcgaaagaagggtcgtgacgaatccacatttgattggaaatcgttcttcccaatgtatgatcagttcaagcaagagcttcgtgattacttccctgtgaagtgtctggaagttgaaggcgctgaggctgacgacctgatgggtgttcttggtcctcgttatgcgcctcacactccggtctgcctggtaacgtctgacggcgatatgatccagttgcagcatcagaactcgaacatcaagcagtggtcgccttggcacaagaagttcctcactccgaagaatgctgagtatgatctgtttgagcatatctgtcagggcgatgcgggcgacggtgtgccgaacattctgagcgatgacgacaccttcatggctgatccgaagaagcgccagaagcctcttcgcaaagaccgactcgcagagtggaagaagcacggcatcaccaatccagaatacttctgtccagattcggcagcgcttgatcgcttccaccgaaataggaagttgatcgaccttcggtgtattcctgctgacctaaccactaaaattgttgaatcctatgaggcggctgtgcctgcaacaggcaagatgttcggttacctcactacgatgaaactcacaaagatccttaaggaaggcggcttctaagatgccaatgtacgacttcaaatgtaagacgtgtgatcatgttcaaactgagatcatgtctattgcccggatggaatcaggcgaagaagccgtatgcaaagagtgcggtggggtgtctgcaaagaccttcaccgcaaccaattgggaagctgcatcggctgagtcacttggtcggaagaaggctcctgaggacttccgaaacttcttgacacagattaagaaggcacatccaggtagtactatcaaagatcattaatcatggctaagtctgcggacggaatgtggggctatagtacccgaaaagagacaaagcaatttcttgaaaagttcatggccaagaatcagtccgagactgataggtttattcatacatacacgtcactcctagatggtatgtatgatatcaaggagacgatcaagtctacgtcttacagtgaacctgaggaagtgaagttcatcacaggtaaagtcaagcaactccctgaccccgatgtgaactggggcttctcaactattggtgattcactttatgactgatctcattcaactgcgaaagctcgtcgcagaatacaaggctgatcacaagccgctcgaacgataccctggtgtaactcgtgtcctcagtggcaccaaagacatgacagggcttgatgcatggcgtgatcgaattggtcatgaagaggctgatcgaatcgttgccgagtccaagatgattggttcctcactcgacaagatcttcaacgattcgcttgagtcggtcatcaatcaggtaccatttgaagaatccctttatgagaacgaggcaggctataaactgtttggacagttgaagccctacttgaagagaaccgagccggtagctgtccagcttaaggtctggtctgatcacatgaagatgatgggttacctggattgcctgggtctttatgatggtgtccttactctgattgattgtaagaactccaagaaggaaaagcgagaggaatacctcgaggactactacctccagtgtactgcctattcgatgatgctgtatgatatgcttggcctaaagatcaagcagatggcacttttcattgctcgacgcgattcaccattcccgcagatcgtcatcagagacatcaagccgtttgtaccgatggtgttgggtcgagtaagaaattactatgggaaccttgcacaatgaaaatcaaaggcactaagatcgaaacagtcgatgttgatatcgatcctttggaagtgatcaagacttgctacaaaaggtggaagagtactactcctggcgagttcatcaggaatggtaattggtatgtcgaggtgcacacctcacattcgtatgatgaattggttggtccagtgtctgatcaagacatggaaatctacaaggcattccagatcgtctcagaattaatctcaggaatgaaatgaattacagtgaaaagatcctcgaggaactgacgctaagagcaaggcgagacaacatcggcttgttcgaggcagcatcagactactgcgaggaacatgatttggaacaagccgagttcgttgaaacactcgaccctatcatcatccaacgtctcaaagaagacgcagcccgtgaacgtaaagtcagaagatgcgtgcagaaaccgtccaaaactcttttctgagtgcaccactcagaacattccaagattatgtcgggctcaagctacacttcaacggtgacttagtatggaagcgccacatggtgctttcgcttcgtgaggagcagctgctcaaacgaaaggacgcatactatttcatccagttggctgagcagcatgatcgcgaaaagatcatccaaatgatgatctcgatgttcaagcgaaagcgtgactcttggattggtgagattctcgaggaggagaacgtcgagtatcacaagaagcggatggctgtaatcaactcgttgaagtacgttattcgtaccgacattgaacgcatcgtgttgttcatggaggacaataagatagatgttcgtaaactccttttgtcggacggtcaaagtccgtatattgtatcacaccagtcggacattattggtggtgtgaccgacgaaacactcgccctgttagagagggcgttcaagttttgctcacaggacacgttggaccctctttgggaagagcgcaagttcatgctgggtaaatacagtagctggattgaggtggacggagacttcctgaaacaacaactcaaccggctagtagaggcgaagtaagtccataagagacagtaagacctcaattcaaatagagaaaacggagactaaagatgtcatttgcagcacttaagaagcagcgtggtaatttcgccgacctcagcaagaagcttgctgatgaaaagaagggcggtggtggtaacggtccagatgagcgctattggaagctcacgaccgacgaagctggtaatggttacgccgtgatccgattcctcactgcaccagtgaacgaggaatacccattcgtcaagatgtactctcacgcgttcaagaacgatcgtaccggtaagtggtacatcgagaactgccgctcgaccatcaatgaagccgacccggttatggaagtcaattccgaactgtggaactcgggcattgaggcgaacaaggatctcgctcgtaagcagaagcgcaatctgaagtacatctcgaacattctggtcatcaaggactcgaagaacccgcagaacgaaggcaaggtcttcctgttcgcatacggttcgaagatcttcgaaatgatcgaagctgctctgcagccgaagttcgaggacgagaagccgttcaatccgttcgacttctgggatggtgctgacttcaacctgaaggcatacaacggttccaacaagcagcgttcgtacgataagtcgggcttctcggcaccggcacctctgttcggaggcgacgacgcagcactggaaaccctgtggaacaagcagtacagcctgcaggcagaagttgctcctgagaagttcaagtcgtacgatcagctcaagacccgtctacaggcggttctgggcaacgctccaggtggacgtcctgcatcgcaggcaacgagccaggcacaggctgtggaacgtgaattcgcagaaccggcacgtccggcaactcgtcaggagccagcagcatcggcaagtgacaacgaggacctgtcgcagtatgcagcgctcctggaaggcttcgacagttaaggtcgaaaccatagtttgattaaataaaggaacggcgcaggtcgttcctttatttttagctgacaagaatatgatcctacaagagaacagcttttattcagaccaatctggtctcgctacgttgctcacaaacaagcaactcgtagccgatattttctatatcaacttcctcgggtttgctggactccttaagatcaaggacgctcctgcgctgatgacctatgtcaagggtttgggtaagctccagctttccaacatgacagacaccaatgctgattggagcctggctatcaagctggcacatgatgcaggtatcatcaacatggtcgctgccaacatggcaacgaagttccttgcactggtcaagagcggaaagattcgctcagctgaccttaaggacgatccaatccgagatatcatcaaggcttgccgtgtaatcagcaacaagccttcaccccgtatctatcaggctgttcaagactttgttgatgcaaaggaccagctagagacgacaaccgtcaagctctggaagctgtctgcacgtccagagctaatgaccgctgctaaggaattccgtgaacagatcaccctgggtggctattcgtccgcattcctgaaacaccagtgggcaaatggaactgcaacgacgcctgctccagctgtagctgttcagcagccaccagcaaagggccagcgtggttcgttgccacctcagggtgctgcacatggttccgactcggattacatggctgctcttctccatgtgttcaagctcaaaggtggtattcacagctacctggaacgtttcggcttcaagggtcactttgacgttgatcgtttcaagaaggctgtcgcatctcctgagttcgttctatctcatggctatcacgtgccttgggagcagcatccgtttgtccagtggattcgtaagaaggatccttcggcttcggcagctgtgctcaagatcctcaatgacaaggatcgtcagacaggtgcaatcgctgtagcaactcaggtatcgaatactgcacctcaggcacctaagccagctgctgtaatccagactgtcgttgcaaatcgccaagagccgattgtgactaatgagtctatctctgagatgtacctcaacggttttgatcctaagcttcatgcgttgatgatgaagtatcattggcctaagggcgaagaagcgaacatcatcaagtcgaatcttcctaaggttctgaacgccctcaagacattcgaggttgatgagcttaagaagcctcatggtcgaattgaacagagcgaatatacgcagagcacctttgcgcgtatgcttcttggtaacggcgtgatgccatcccagatcaacggacctatctacaacactctgttgaagtcgggcgagagaaaggacgctgatgctgtattcaatcttctgatcgattacaacaacgcatccactttgaagcagaacgcgtttggtggcgacttcggtaatgacccagttacgactgcggtgtcccgcctgtttgatggtgatggtgttgatttcattcttgatcacctgtcacagatcaacagcgtaggattccagccaatcgtctatgatgcaggtaagcatctttggatcggaaacgatgccgaaacagagatgatccgtaacctgatccaatgcttgatgttgcctacgtcaaccctggacggaattgttcgcaacatcgaggcaacgtttgctcgtcttgatatcagaactggtcgaaccatcggaaagaaccttgcagttgacaaggaatccttcgataacaaggcgtctgcaaaggtcaagaagctcgtcgatgcagtgaataaggaaggttacgttgatatttccctgaagaaattcgaaggtgatacgatggagatcctcgacctcctgacagtagctaagaaggtcacgcagggtgcttcctatgcaatgtctgatcactttgtttctctgttgggcgatgcaatggctggcaagtttgatatcacgccagtgatcaaggacgaggaagacctgttccttatcttcaaggcattgcagcaagcagcattctacatgaatgcaacatcccgtgctacggctggaactatcatgccttggctgtatgagaagatggcagctgttggatctttgaactggaagatgaacagagcgcctaacccatatggtgagtatcctttcccacaggctactaactatttcaagtatctgctcgaaaagggacacaccacagcggcacgccatgttgctccatggatgatctactacggaacaggtagcgatatcttcaagatgatcattgcgcagttccctgagctgaaggaagaagtcttcaagcgttctggacagatcggtcatggcggtacgacatttgctgcgattcttgatcaaaagtttgatcctgttgctatgccttatatcagcctcgacgcgctgacctcatttgttcgttcgattgcaatgcacggatcaattgaagatgctgtcaaggctgcgcgctgggcaagagaaaagatcatgaaggaacaacctgatcgtaagccttgggaacaagctagtccttctatggtaggtcttctgggaactgcttggttcgttgagccaagcgatcctcactatgatgatgcgctcaaggtggcttcaaagtggctgatctctactctcaagcaacaatatagcgaaagtgacatcaaactgttccaagcctacaacccagagttctggaaggtatggatttcagaaaagaagaagggcgctgagaatagtcctcacgctacaacctcactccgtggtatgatggacacttctgagtattcggaactctacatcaactgcctgaaaggccagggtctagatgcaatcaaggcaaacctgattgactcgaccacaggttgggctgctcagttgatgcaggttgcggactcggatgacattacgattgacgccaagaaggagcttgttcgtagattcgctcctgcgatggaagttaacggcgttcacaccatccgagataagtcgcaccgtgactcgctcaacaagaactttgctgatgttctgctcgacgtctatgactcggataaggaccttgcagacaaaatctttgctgacctgccgcgaacaactcgtactctgatcgtaaagatgcagggtgagatggcttacatcgaagcaatcaaggacgacctctacaagcatcctatcaagcctgacttcccgcttgaccatgctcgtattcgtacgatcttgaagtacaacaacctagctatccgagtcacgtctaaccgaaacattgtccagaccatcggtgatattgattcggcagctaagtcttcgatcagcaaggctcttgtggacctcaaggtctccgaagtgaaacaggatgagacggcgcttgaactcgagacaattcgtctcaacaagttccgaaacaacaagcacggcgaagttgcattcaaggttctcaaatcgtttgacgttgcattcccaggcgcaagcaagagaattgccgaattccgaaagaacaatcctcaggatggtacgcttgatcctgtgttccacggaacaggtacaattgccgcttcgatggttctgcgtaacggattccagatcattcctgcaaacgactcctcagctgttggtcgtatgcttggtaacggtatctacttctccaatgtcatcgacaaggcacagcagtacgtcggcgacaagggtggtggcatcacgcgtagctatggtacacgtggttacatcttcgagatggaagccgaactaggaaagaaccctaaggactatcgttccgctggtctcggtcgcgactctatccgttctccggaatgggcagtgtttgatccggacaatcagcttcgtatctacaaggcatactacattgagcttgtaagcctcaatgcggttaaggcgatggctgcaaagcacaacaccaagttgaatgaatcggtaggtagctcatttgaagattacatgatggagaaaactgtggatacaaaggcaacatcgaagttctggttcatgggcgattcgttgcccaagtcgatgacggaaacttgcgaagtcagcgagttcaagtcgaagcgaaacgtctacacagaaccatcgtgggacggcggtacgatcgtttctatcgaacattcgctagacattgagccggtaacgatttcgattgatgacacggcgaagtggctgttcaacaagccagatgaagctaagttgttcttcgatctgatgaactgatctactaccaataatagctgggctcggaagggtccagctattatactatacgcacatcctatgagagaccccgcatgagcgacgcaccatttcatctatccattgataccgaaaccctcggtatgcgtgaaaacacggttgttctgtccatcggtgtagcagcattccagctggtgccaggtgcgaagaacgactatgacaagatcatccgtgacggcttccatgtgaagttcaatgtcaaggaacagattgtcaattacaagcgcaccactgaccagagcaccattgattggtggaaaactcaggaacctgcagcgcagaagattctcaagccttcagaagaagatgttgacatggcttctggtctgacaatgctcaatgactggatcaagcgttcggggtatcgctggaaagattcatttgtctggtcgagaggtacatactttgacttcccgaagctcgaacacatgtatctgcaagcgggcgtgaagtgcggcttcaacacctggaagattcgtgacacgcgcacgatgattgacgttctgactggctcagaaaacggacagtacgaaccagcaggtggcttcccgagaaacttcttgaagcacgacgcactgcatgacgctgcaatggacgcctaccgcatggttgagatcttcaatcttgctgcaggcggcgaaccggacgatggtccgccctggaaggaataaaatgagactctacctgatcgtaaaccgctatagcatgagtgtccaggcaggcattcaggggatgcacgtcatccccgagctgtacgaaaagttcttgacccctaagtggaatcgcgcctacctgtctaatctttctgactgggctcgcaaccacaagaccatcatgctgctgcgcactttcggcggtgacgaaagtatcgaagagctttacgaaaagattgcaccgcctgcgaaaggtttgcaaatgccgttcgctctgttccgtgaaggtgcgatgcgaaactgtgcaactgctgtgggcgttgtagttccgacggcgtactacagcaatcctatcgaagaactttctggcgacctgctgactctccgcgaaactttgagtcctttcccgttcgccatctaagattgttctttctttgtcatcgtttaaactgtgaacacatcaactaaaggaacaccgaagtgagcttgtcctacacccacagcgaacgcactgtcaagaagtacaccgtcaatcaggcatgcacctcggcgcgttatcgcctcgagaagagtggcctgaccagcctgtgcaccaattcgatcagcggtcgttcgggtagtgagctgatcactctcgaagagctgaacaagatcgctgacgccatcgtcgacgacaccttcctgtacgatggccacaaggcccgtcgccggtgataggaatgggtatggaagtctacttccgtagctttgtcttcgataccctcgctccttacttcgacaagtacaagggaatcaagttcaaggttgtgcgaatcgttgaaggttcgcacatccagcttgaagccattgacagcgatgtcaaggttgagggtctcgtccacgcagactatctgaaaagagcatgacccaggatatctacaagcaacttcgtgacctcgccggaaagatggatgtgaccatcatcactgccaaggctccgccccgttgggaaccggaccttcagggcggtgttcgtatcgtcgattatctcgacatcttgaagcctttgggtggtcttcgccggggtgaactcactgtgatcagcgcaaggacgtctgccggcaagtctcttttgtcggaggcttcctgtggcgctcgctaattacgatctgttcctcgatgacgagcgtgacccagctgggtctcttgaacatgctgaggtggctcgcaactactgggagttcgtagagataatcgaagagctgggcattccgaggcacgttgcctttgatcatgatatcggcgatgattactacaacggtaagaaatgcgctgagtatctggcagaacgattctacgaacaaccgtgggacgcaaagtacttcacctacagcattcattcccagaatcctgtaggtgcagagaacattcgcgccttcctcgaaaacatgaaaaggcatttcgctgatggataagaatgattggcaggcttctgcaaagtcaaagaagcatcttcgtaattgcatggcatacgagttgagtcgtgcaggtggcaatgtcatcttccgattccatttctccagacaccatgtcttccgtatcccggaaacagaatgggaagaactacctaatggttaagcacctcttcaatcctgaaaacgagagatacacgactgaggcgcttgccctttctgaggaagtctttgaggcgatcaaaccgatcgtcgacaggtatgctgaccaagggtatagcgtgcgagacattgcttctattgtccattccgaagtcgatatcgctacgattctgagaatcatctgatgaacccaaccaaacaaatcgcgcttgagttggaacaggcacgtcgagaattccttgatgagccgtttactgccaagtggccagaaggccttgagcaggaacaaatctatcaactcgactgtgacgataagggtcgcagtggcgcgaattggttgaaggtctacaccgccggcgatggcgatgtgcatttgatgatgcaagactgggaagagtatcccgagtttcaacctgagttcatgccttcgctgcgttgtcgaacctatatcggtggaggtcggaattggcgtacccaccaggcattgctctggcttgcccaggcaattagactagacaacatagagaataggcgcaaccatgtttaagattttcaatggtacggtcaaccgtacacacttcggtgccttctacgggatcatggtgacccatgcttcgcagtggaacatcgacgaaggaactgacctcattcgttttgaggtttcggtactagatgacaaggctgacagtttccgagatcagctgtgtagactagtcccatgcgtagagttcgataaggagcctacggcttgggaaatgctaatcaattttttcaccaaaaagaaaggtaacgcctgtgaccaatgctgctgataatgctgtcgagtaccccgttctgaacgatccgaagatcctggccaaggtgaagggtgtctgtcaggacattagcaatgtgatgaccatgatcgaagcttcgcgctcgaccatcaaggctcacatcgacaacctggcggaagagatcgacattccgaagaagctgatccgacagatgagccgtacctatcatcgtcagacctttgaaaccgaagtacaggaaaaggacgctttcgagcagacctatggaaaagtcttcggcttcgacaacgactgagaacgaaatgttgcgcctcatcaacgagctttatgaggcgctcgatttcgatgctgagcactgtgactttggtcctgcctacggcatgtgggaaacgcgtcgtcgaaaggctatgcaggaagcacgtcgcctgttaaaatcaaaaaacttcaagcggagttgattatggctattctcgcagttctcctcggtattgtcattgtcggtggcacgttcatcctgctcgccgatatcttcatcattcgtcctctcgagggatacagaaaggatcggtggtacgaccggttcgtcatgtaaagaactcctgtggtggttgggcacgagacccctagaaataggggttcttgtgtgataggctagtaagtgtctgattcttggtgccacacagatacgtaagtgtctgattcctaaggttgtcctgcacatagaaagaaactaatatgtggctgtaggcaataccaaccaaggaatgcagaaatgacggaagaaaagacgtatcgggttcgcagtcgtgtcctggctcttcctaaaggagccgacaaggcgaaacagctggagtatgcgctcaagcgacgtcgtcggcagaaaaagtcttggcctcagcctgaagatgcaatgctgattctccctctgcacttcaacgtctattcgttcagtcgtcagagcttccacgccgaagcctgcatggaaattccgaccaagaaaggtttcgagtatttcactgtcagcggtggcggcaggacacagtttgctgcactgaggcaggtcattgaaaagatcgaggcgtcagactggttccatcagatgaaggaacagaaagtctacttcaagatcactggcggcggtatggaggaaatctaccgaggttacctctgatctagtatcgtagttcatttgtagatgccaaccaagtctttaaaataacggatgtagtaaacacattcctgtggacattcgttatgacagaacagacaaagacaaagcgcaaatacaccaagaccttgaagtgggaagtgaacaacgagcaattctctgggttgacccaggcactcaatcgagtgaatgaactgctcaagactggtgcttcggaagacgtccgaatcaaacgcatcaagccagcaatcacgttctaaaggacacgggcgagagatcgccccttccttttgtcagaaattcaagctaggagttaatcatggcaactcacgttcgtattgactacgacgaacatcgttacgttacgcgtgctggatcaccggatgatcgctgggatcgcgacgatactgctgcagacatttccatcaacggcattgaaatcgtttctgaggcgcggtaccgcgaccttaccgttcccttcgatgtagacatcaacaagtcctacattctgctttgggcggattacaacaccggcgatagctttggacacgacagaaactacgtcgag

SEQ ID NO: 11 - protein, 487 aa, unidentified
  REGION 1..487: note = the amino acid sequence of tail fiber of a bacteriophage
MAFATGTAANHVDALDKLRLFLTANESLVAAGQTWQQLRWVPDNLDSVDTTLPFSSGVSLHRMFRPDFRTQNYNDDANGQYLSSTSFTPDQYVRLKMRAARAVTRFTLKAGQSSNVRNYTPRNFRLEYSDDGSAWSTALDVTEQRAWTANEERTFTVPSATGEHLWWRLVTKQTGDYGGTLTGSQWELRSLWLYDGSELVSSSESYLVVKGPGLAGDEEIFAAFRTSYNTGTGEYFMMVQGLTGYLPNEQSPHRQPGLHPSGWPVVPLWGASMPFWFVGSGRRVVFVFKVSTVFEAGYAGFFLPYASPQQYPYPMAIGGSMSPRSDSYRYDFVSAAHSAFPMPGSYNSVSASEVAAFSTTLNVMLPDGSWFDLHNRPSSGGQSESYSRWSSSPGSVLPHGMFDGNNSSSSAGYGIRENVGGGFTVLPSTLFQRQPSGRFLGELDGCFQISGFQNGSENTGTIEGEDYVVFQNTYRTDVREYWALKAE

SEQ ID NO: 12 - DNA, 1464 bp, unidentified
  misc_feature 1..1464: note = the nucleotide sequence encoding amino acid sequence of tailfiber of a bacteriophage
  source 1..1464: mol_type = unassigned DNA
atggccttcgcaacgggcacggccgccaaccacgtggacgcgctggacaagctgcgcctgttcctgaccgccaacgagagcctggtagccgccgggcagacctggcagcagctgcggtgggtccccgacaacctggactccgtggacacgaccctgccgttcagctcgggcgtttccctccatcgcatgttccggccggacttccggacccagaactacaacgacgacgccaacggtcagtacctgtcgtcgacgtcgttcaccccggaccagtacgtacgcctgaagatgcgcgcagcgcgggccgtgacgcggttcaccctcaaggccgggcagagctcgaacgtccgtaactacacgccgcgcaacttccggctggagtactcggacgacggcagcgcgtggtccaccgccctggacgtcaccgagcagcgcgcctggaccgccaacgaggagcgcaccttcaccgtgccctccgccacgggcgaacacctgtggtggcgcctggtcaccaagcagaccggcgactacggcggcaccctgaccggctcccagtgggagctccggtccctgtggctgtacgacggctcggagctggtgtcgtcctcggagtcctacctggtggtcaagggcccgggcctggcgggcgacgaggagatcttcgcggccttccgcaccagctacaacaccggcacgggcgagtacttcatgatggtgcaggggctgaccggctacctgccgaacgagcagtccccgcaccgccagcccggcctgcacccgagcgggtggccggtcgtgcccctctggggcgcctccatgcccttctggttcgttggcagcggccgccgcgtggtgttcgtgttcaaggtgtcgaccgtcttcgaggcggggtacgccgggttcttcctgccctacgcctcgccacagcagtacccgtacccgatggcgatcggcggctccatgtcgccccgctcggacagctaccggtacgacttcgtgtcggccgcgcacagcgccttcccgatgcccggcagctacaacagcgtctcggccagcgaagtggcggcgttcagcaccaccctcaacgtgatgctgccggacggatcctggttcgacctgcacaacaggccgagctccggcgggcagtccgagtcgtactcccggtggtccagctcccctggctccgtgctgccgcacgggatgttcgacggcaacaactcctcgagcagcgccggctacggcatccgggagaacgttggcggcggcttcaccgtcctgccatcgaccctgttccagcgtcagccgtcggggcggttcctgggcgagctggacggctgcttccagatctcggggttccagaacggctccgagaacaccggcaccatcgaaggggaggactacgtggtcttccagaacacctaccgaaccgacgtacgcgagtactgggccctcaaggcggagtga

SEQ ID NO: 13 - DNA, 63753 bp, unidentified
  misc_feature 1..63753: note = the genomic sequence of a bacteriophage
  source 1..63753: mol_type = unassigned DNA
gcgggctgggccaggctgttcggcgccgagccccgcctcgtcctgcaggtggaggtcgacgtgcccgacggcccgcccgacgccaacggcctgccccagtggctcgccacccgcacctgggtcgacgcccgggtccagcaccttcccatcatcccgctcgacgtagcctgaggcccccatggacatccagcaagccgaccacttccccgacccgatcgaccgcgcctcggccgagtccctggcccacgacgaggcctccatagacgctgcccgcagggcggccgaggcccgcaacaggcggtgggcgccccgggaggacggcgactgcgcctgcgggtgcggcaacgaggtcgacccgcgcaggctggccctgggctacggcctgaccatcgagtgcgccaccaggatggagcgccgctgacatggagaccccgaccaaggagcagaccgatgccctcctggcggaccagctgcgcgaggtccgggtcgcctgggcccggcgccgcgaggccgagtcccagctgagccgcctcgccaagtacaagaccatgaccccgggcatgagggacgaccacaagcgctggctcaagcagctcatgtccgccaacaccgtcatagaccgcatcctgggagcgtgaaccgtggccgaggtcaccaacatttccaagcgccgcatggagcgggacgtctactcccgcgaccccgacgtctacctggaggcctggctcgacgaccggggcgagatcctggcgacccaggtcaggggcaccgaccgcgcgcccgccgagaccgggcgccaggcccacgacctggcggacaccctcctgggcatgtcctcccagggcgcgtccatcctgggcgaccagaactgggaggcggagccggtcttcgcggcccacctcctgcgcggcggctacatgatgacccgcgccaggcgcttctggaggaccgaggccagggagcccctgggcaagcgcctcaagtgcgcctggtgggtcgcacggaacgcctggcgggccctggggaccgtcctggcggcctgctactgcctggtcctgcaccccgacagggccttcccggccgacgaggaggactgatggcataccagccaccccactggcgccgcaagaagaccccgcagcaggccgcccaggagggcccacggaccaaggcctggatcccccaggccggcagccaggtcctcttcctgacctgcccggtcttcgagtgcctgttcgagggcacccgcggcccgggcaagaccgacgccctcctggcggacttctgccagcacgtgggccagggctacggcgccgcctggcgcggcgtcctgttccgcgccacgtacaagcagctctccgacgtggtcgccaagagcaaggcctggttcaagctctggttcccgggcgccaagttcaacgagagcgactacgtgtggaccttccccgacggcgagcagctcctgctgcgccacatggcgaaggtcgacgactacgacaactaccacggccacgcctacccgtggatcggctgggaggagctcaccaactgggccacctccgagatgtacctcaagatgttctcctgctgccgctcgacggtgccgggcatgccccgcaaggtgcgcgccacgaccaacccgtacggcaaggggcacaactgggtcaagctgcggttcaggctgcccggcatgcggggcaagatcatcaccaccccgggcgagcccgaccgcatcgccatccacggccacatcagcgagaaccgcatcctgctggacgcggaccccgagtacatcaaccgcatccgggcggcggcctcgaaccccggccagatcgcggcctggctcgacggcagctgggacatcacctccggcggcatgttcgacgacctgtggcggacgcagacccacgtcgtgcggcccttccaggtaccgcgcacctggacggtggacaggtccttcgactggggcagcagcaagcccttctcggtcggctggtgggcggagtcagacggcacggacctggtgttcccggacgggcgcaggatgcgcacggtcaggggcgacctgttccgcatcggcgagtggtacggcctcaagaagggcacggagaacgagggcctcaagatgctggccgcggacatcgccgagggcatccgcctgagggaggtgggcatgggcctcgccggccgggtcaagccgggccccgcggaccccgccatctggtccgaggagaacggcaactgcatcgagcgcgacatgcgggccaagggcatcaggtgggagcgggcggacaacgcgcgcaagcagggctgggagcagttccgtaagaggctgaagaactccctcaacctggacgagatggacgagcccaggcccaccgtgcgcgaggcgcccggcgtgttcgtggtgggcgagcgctgccccgacttcgtgcgcaccgtgccgcccatgccgcgggacgagaaggacccggacgacgtcgacaccgacgtcgaggaccacgccggcgacgactcccgctaccgcatcatgcacaagcggaaggccgtccggcagggcagcttctgaacgacggtgtgcgggccacggacggcccggcatcattaccccatcctccgacacgctgaccgacgagacagcgctaggctggcaccgagtaagaggcgacgcccacgatctagcggtccaggggctgaccatccgaaaggtccacgcagcaggatcaacctcccgtcacgtccccgcccggaggtccacccgagggcggggacaccatggtccaggtcgtctaatgtggattaggacacctcccggttaggtttgaagccgccaggaggagaagcaggcccgcaacctgcccaggacccacccaacagtctgtaccggcgagctcccttatgatgttcacaggagtgcacgcctgagcaggcccgccgacgacgacccactccccgggtaacggtcgcagagcctgcaggagccctagggagctccccggtgcagactggcaggacaggatcggcgggaccactccaccatgggggagtggagcaaactgtcgtccagcctggcgggctataagcgcctccgacccctgccagcaccctcgaagcccccgccgatcgggggcttcgccttttgtggagttcgatggcgttcggccacggctgggcccggtaaactgagctccctaccaaggagtccgaccatgaagaccttcgacccgggcgccatcgtgccctaccagatcctgcccatctccgaggaggaggccaccaagctggtggacgagcgcaaccaggcacgtcgcagccgcggcggcctgagcatgctggccgagaagcaggagatcttcctgcgggcggtggccagggagcgcgccgaccgggcgtggctcgaggccaacacccctatgggcaccgtgttcgacctgctgggagtgtcccacatggtggtcagcgtgccccactacatcagcaccgcggagagcccgagctggggtccgctgatggtgaacgtgatggcccccgacggccggggcggcatcgaccgctccatcctgagctgcgcccagctgcgcgccatgctcgagcccgggttcacgcggccgtgaccgcctactcctccgtccgcaagggcgtccgggcctggctcgaggccaacccgggcgagcactccatctcccacatcgcctcgcaggcgggcctcgaccgtgacgcggtcacggacgtcctgggcaagatgcgcagggcgggggaggcgtcctgcaggccccaggggcaccggaagctgtacaggctcatagagggctccgtggacacgtccaggaaggtgggcggccgggaccgcgaggccaagcgggagtacgacaggctctacttccagcgcaagagccaggagctgcgccggcagaggctctccaggctggcggacgaggcggcccctcagcccgagcagcccagggaggagcgcgccgagaccgtggccgagttcaggcgccgcggcggggagatcgagatgctctcggcccactgggactgaacgacggcccgcggccgacgcctcccgcggcatcatgcgcctaccgggtctggacagcccggtcatggtgattccatcggttgagttggaagggctgagagccccgatcccacaagggtcggggctttctttttcgccggctcgcgctacgagcgtgcgcgcgtcacgatgcgcgctcggcccgacgcccgggccaaggcccaaccaccggagtgaatccatgatcgaccctaagacggggattgtcctcgaccccgcgcgcgacgccctgctcaccgagttcggcaccgccaccctgtccaagcagtactgcctccccggcgagaccttccagcaggccttcgcccgcgcggccaaggccttcagcggcggcgacgacgccctggcccagcgcctgtacgactacgccagcaagcagtggttcatgttcgccaccccgctgctctccaacggcggcaccaaccgcggcctgcccatcagctgcttcctgaacgacgtcgacgactccatcgagggcctggtcgccaacttcggcgagaacgccctgctctcgaccaacggcggcggcatcggcaccaactggagccgcgtccgctcgatcggcgaggtgaccgccaagggcgtggacacccccggggcgatggccttcatgcacgtccaggactcgcaggccatagcctaccaccaggggcgcaccaggcgaggtgcccacgcggtctacctggacgtctcccaccccgagatcgtcgagttcatcaacatgcgatcgcccaccggcggcgacgtgcaccgcaagaacgagaacctccaccacggcgtgaacgtcaccgacgccttcatgcgggcggtggaggacaacggcccctggcagctggtcgacccgcactccggccgggtgaccgacacgatccaggcccgcagcctgtggatccagatgctccagcagcgcgcccgcctcggcgagccctacctgttcttcatcgacgccgccaaccgcgacctgcacccctccctgcgggccaagggtctccgggtcaaccactcgaacctgtgcaccgagatcaccctgccgaccacgccggaccgcacggccgtctgctgcctgtcctcgaccaacgtggcgaagcgcgacgagtggtgggacgtgcgggagcagttcatcggcgacctggtcaccatgctggacaatgccctggaggtcttcctggagcaggcgccccacggcatgtggcgcgcggtcgcctccgtgttcggagagcgctccatcggcctcggcaccctcggcttccacacctactgccaggaccagggctgggcgctggactcccacgaggccgcgaccttcaacgtcgtgctgtactccgagctgaaggcccacgccgtggccgcctccatgcgcctggccgccgagcgcggggagcccgaggacctggtcggcacggggatgcgcaacgcccacctcctggcgatcgcgccgaacgccaccagctccatcatctgcggcggcgtcagcccgagcaccgagccgatggtcgccaacgccttctcccagaagacgatggctggcacggggatcatgaagaaccccgcgctgcagcgccgcctcgccgcgctcggccacgacaccgacgacgtctggcgcagcgtcttcctcgagcgcggatcggtgcagcacctgccgttcctgtcggcctcggacaaggctctgttcgtgaccgcctcggagctcgacccgggcgtcctggtcgagctggccgcgcagcgtcagcccttcatctgccaggcccagagcctcaacatcttcctgccggcggacgtcgacacgaggaccatgcaccaggtccacatgcgcgcctggaagctgggcctgaagtccctctactacctgcgctccagctccgtcaaggccacctcggtcggcgtgatgccggagatcctgcgcgagcccgccccggcgccccaggccgaagagacggttgacctgcccgaggtgagcggcgcagcatgcaacctcaacggtgagtgcaccgcgtgtgaaggctgaggaacaacccatgatgatcgacaacagtccgtccctcttctcgaagagagcggagtacaagcccttctggtacccctgggcgtacgaggccttcgtggcctcggagcagatgcactggctggtgcgcgaggtgcccatgacgcaggacgtcaagacctggcgcgccgacctgaccgaccgggagcgccacctgctgacccacatcttccgcttcttcacccaggcggacgtggacgtggcctccggctacatcgaccggtacctgccgacgttcaagcccaccgagatccgcatggcgatggcctcgatcgccgcccgcgagggcgtgcacatccaggcctactccaccctgatcgacgagctgggcatccctgaggtggagtactccgccttcatgggctacaaggagatgctggacaagcacgagtacctgttccagcgccgggacggcctggagggcctggcgctggacatcgcggtcttctcggccttcggggaggggctgcagctcttctccagcttcatcatgctgctcaacttcacccggttcggcaagatgacgggcatgggccaggtggtgagctggtccatccgggacgagaccctgcacgtcgagttcatgatgaaggtgtaccaccagctgctggccgagcatccccacctccgcacggcagagcactccgagcgcatcagggagatcgcccagaagatggtggagctggagttcgccttcatcgacctggcctacgagtccggcgagaaccagggcctctccgccgaggacgtcaagcagtacatccgctacaccgcggaccagcgccttgcccagctcggcgagcgcgccctgttcggcgtcagcaagaaccccctgggctgggtcgacgccatcgtcttcgggaaggagcacaccaacttcttcgagaacagggcgacggactactccaagggcgccgtgacgggcagctgggacgacgccttcggctgaccagcgccccaaactaggaacagcggcatctccagaggaggggcggcggtacactgtgaccgtcgcccctcttttactatccgggcctggcggcacccggtcaggagataccagtgaaccacatgcagcagaccaccgggtccgaggcccggcgcgaccggccctacgagatgggccacgcccgcgtacctaccttcgccaagcgcttcgacgacgtgccccaggcgatgcacgcggccctcgagaaggcccagctgaacgtcgtgccgaacgccttccgggtgaacgtcgggcgcgacctgttcgacctctacctggagcagttcgacccgctggaccgccagtaccacgactgcaactgctgccgctcgttcgtgcaccgctacggcagcctggtcaccctgacctcggacggccggaccaagtcggtcctgtgggatgagaccctgctgggctcccgtcacccctaccgcaaggtcgtcaaggccctgcgcgaggccgtcgagcgcggccacgtggtggaccagttcttctgggacggccgggccgactggggagtccgcgagcagggcggctggtcccacctgtggaccaaccccggcgtgcactcccacacctccggctccaaggacgcctcccaggtggcggccgagcagcgcgagaaccggaagcacctgcacttcgccctccgggagttcaccctgggcgacctggagcgcgcccgggacatgctgatgacgggcggcctcaaccaggccgacaagacggtcaagatggcggagttcctgatcgaggcgaagagggccatggcccacctctccggcgaggccgtcaaccgccgcctgtggttccgcgtcgccatggccggcaaggggtggtgcaccccgcgctcctcgctgctcggcgccctgatcgacgacatccgctccggcgcctccgtcgagtccatccgccgcaaccacaacaagcgcgcggacccgctgacctaccagcgcgcccaggcggcgccgaccgccggcaacgtggcgcaggccgagcgcctgtttgagcgcatggggctcgcccggtcgctcgagcggcgccccgctcgggccgacgaggtcgtgttcgagtggcagccgcagccgcccaagaagaaccaggcgggcggggtgttcggccacctgctgcagcacgagcggctgtccaccgagcgggcgctgctcaacacccgcgccgagcgggtgacctacgccaggttcgctagggacgtcctgccgcgcgccctggagatcgaggtcgtggtgccccaccagggcaacttctgcgcgatcacgactgccgtccaccccgacgcgccgccgatcctgcagtgggactccgtggagtgccgcaacccgttcgcctggtacgtctaccaccagggctcgccggcgtccaactggggcctccgcccgggccgcgccaaggtggtcgggatcacgaagcagccctcccagtggggcggcgggttcgcccaccacggcaactcggtggtgctcatgatcgagggcgcggccgaccagcgccaggcctcgctcgccctgttccccgagtgcctgcgctcggagctgcacgaggtgcgcgccaccctggaggcccactcccgctcggcacgcctggagcgcctgccgcgcggcgtccagcacgcctccggcctgaggctggacgacaagaccccgctggaggtgctggtccgcaccgagggcggcgtggcgaggtacgtcctggaccgcatggactgatggtacgcggttgactggggagggggccatgataggctcctcccctctctattacccaaggagaacaccgatggacttctcaccacccaacttctggctcaccctggcgatcgtgctgttcgccatctcgctcgcctggctggcacggtcgatccggcggcccggcaacatgtaccgcgccggcatcgagtacgcgctggcggagctgcacctggcggaggacgccgaggaggcggccgaccggctgtgggagcggagcgcctccgccttcgaggagcccgagggcgcgctcgagttcgaccgcggcatccgcgagggcatccgcctgtactgcagggcggacgagaccggcatccgcgagctggaggagctgcgctccgagctgacccgcatggtagccgaaggcgatgccagcggctccgaggtcaacgtggccctcgacgtgatcgaccggcgcctcggcgtcggaatgtacctgacccaagcgggcgaggaagccctggagcaagcccgtgaacagtaagcccctctacatcttcgacctggacggcacactggcgaccatcgaccaccgccggcacctcgtcgagtccgaccccaagcagtggcgggagttctacgccgcctgcgaccgcgacaccccgtgccaggcggtcatcaggaccgccaacgccctgcacctggcgggcgccgacgtgtgggtgtggtccggccgctccgacgaggtggcggacaagacctccgcctggctgctgaagcacctgccgtggctgcgggagcacgacccgttcatgggcatggccctgcggatgcggttcgcccacgatcaccagccggacgtgaagctcaagcgcctgtggctctcccagctgcacccggacgaccgtgccaggctcgtggccgtgttcgacgaccggaagtcggtggtggacatgtggcgggccgagggcgtgccctgcttccaggtcgcgccgggggacttctgatgagcttccgacccatgctggcggcgtccatcgacgacgtcctcaagctgcgcttcccgctgcagacctccccgaagctggacggcatccgctgcatcgtgcgggactccgtcgcggtgagccgcagcctcaagcccatccccaaccgccacgtgcaggccgtgctcggccagccgatgtacaacggcctggacggggagctgatcgtcggcgacccggcggacaggatggccttcaacaacacgacccgcggggtcatgtcgatcgccggggagcccgacttccgcttccacgtcttcgacgacgtgacgcaccccgagatgggcttcaacaagcgccacgacgaggccggccggcgcgtgatggcgctcggccggccgtgcgtcatcgtgccgcactgggaggtcaacaccccggaggagctggtgtcggtcgagacgtccgtgcttggcgaggggtacgagggcctcatggcccgggacgcctgctcgccctacaagttcggccgcggcaccctgagggcgcaggacctgctgaagctgaagcgcttcgaggacggcgaggccgagctgctccgcatggaggagctgatgcacaacgccaacgaggccagcacgagtgccctcggcctgacggagcgcggccacagcaaggagaacctcctgggcatgggcaccatgggcgccctcgtcgtgcgggccgtcaacgggccgttcaagggcgtcgagttctccatcggcacgggcttcaccgccgaccagcgccaggacctgtggagccgccggcacgacgggctcgtcggccgcctcgtgaagtacaagttcttcccgggcggcagcaaggacgcgccgcgcttccctgtgttcctgggcttcaggagctcggccgacatgtgacgggcggaggctgctggctcacaaccagcagcctcccgggctaccatcgcgagcatcagctcacaactagcccaaggagcccgcgatggccgacggacccaagaagaagcccacggtcgccacgccgtccggggcctacctgcgcatgcagcccctgtggaagatgatcgacgccctcctgggcggcacgaccacgatgcgcgctgccgggaaggagtaccttccccagtacgacaacgagaccaacgcgaactacgagtcccgcctcgagcgggccgtcctgctcaacatgacggagcagaccctggacaccctggccggcaagccgttccgggagcagatcgtcctgggcgaggacgtcgacgccgacttcgaggagctgtccgaggacatcgacatgcagggcaccaacctgcagtcgttctgccgggcctggttccgcgagggctgggccaagggcttctcccacgtcctggtggaccaccccacccccgaggagaaggtcgacgctgccggcgtggcggtcgcccggaccctggccgatgacagggccgagggcatgcgcccgtactgggtgcacatcaagcccgagtgcctcatcgccgcctacgccatgatggtcaacggcaaggaggtgctgacccacgtccgcatcaaggagaccaccgtcgagcgggtcggctgggaggaggtcgagatcgagcgggtccgcgtcctggagcccggcatctggcaggtatggaagctggtcgacgagaagaaggacgagtgggccatcgagagcgagggcaccacgaccctggacttcatccccctcgtgacgttctacgcaggcaagcgcgtcgggctgatggacgccaagcccccgctgatcgacctggcccacctgaacgtcgagcactggcagtccaagagcgaccagcgcaacgtcctcaccgtgtcgcgcttccccatcctggcggccgcgggcgtgcccgccgagcagaaggtcaccatcggccccaacaacttcctcaccaccgaggacgtgcagggcaagtggtactacgtcgagcacacgggggcggccatcgcggcgggccagaccgacctggaggccctggaggaccagatggccacctacggggccgagtacatgcgcaagcagccgggggacgagacggcgaccgggcgcgccctggactcggccgagagctcgtcctacctggcgtccaccgtgcacgacttccaggactgcgtcgagctggccatgaagtacacggccaactggcttggcaaggacgacggcggctcggtgcaggtcgactccgacgtggacctcggcgaggcggacgccgccgagctggacaccctgaacaaggcccgcgcgcagcgggacatctcccgcaagacctacctgggcgagctccagaagcgcggcatcctggcggacgacttcgacgaggagcaggacgccgagttcctcgaggaggaggccaagaacacgatgggcgacatgttcggcggcggcaacggcacgggcctaccgggccagcagcccccgggcaaccagccgcccggcaatcaggacccggcccaggtcgacccgcccaccccggatgacgagtgatgcccaagaccgctaacgaggagatcctcgacgcgaccgtacgccaccagatcaggctgctgcgcttctcccagggggaggcgcagaagtccgccgagctgctggcccagagcgacgccgagctggtcgccctgctacagtcgggcctcaccgacacctcggaggcccgcatcaggggcctcctgaccgaggtgcgccggatgcgcgccgcggtcgccgagcgcatccaggtggagctcgaggaggacatggagggcctctccaagaccgaggccgagtgggaggtctccatgctccagggggcgacgccgatcgccctctccttcaatgcggtgcccgccacggtcgtcaaggccgtcgcgggctctcccatcaatggcatcccgctccaggggtggctcgggaagatggcgaccaacgacgtcgcccgcatcgagcagcagatcaggctgggcgtcctccagggcgagaccatcgaccagatggtgcgccgcatcaggggcaccaaggccggcggctacaaggacggcgtgctggagaccacccgccgggaggcggagatgatcgcccgcacggcgaccaaccacgtctccaccgccgcgcgccaggcgacctgggatgccaacgccgacgtcataaagggcgtccggtgggtcgccaccctggacggccgcacctcccccgtctgccagagccgggacggcgaggtctacccgatcgacaagggcccgcgcccgccggcccacccgaactgccgctcgaccgttgcccccgtgctgcacggggaggagatcgtgggcgaccggcccacggtgaccgacacccgtacccgccgccagcgcgagatcgacttccgggcggaggccaaggaggccgccggcgacaagtggaagggcatgtccgcggccgagcgcaacgccgccatcaaggcccgccgcgacaagtgggccgacgagaacatcgggcagacccccacctcgacgaactaccagtcgtggctgaagggccagtccaaggagttccaggacgaggtcctgggcaagggcaaggcgcagctcttccgggacggcctgccgctggagaagttcgtcgacgagaagggcaagccctactccctggcggagctgaaggccgagctggagggcgacaagctgaacgtcatccagcccggcgtgggcctgaaggccaagtcgctgctgcagcagggcatgtcgccctccgaggtgctggaccagatcaagcaggagttcccggacgcgtccacctcggcggcgtccatcgcctcctacaagtccgagctgaacaaggccggcgcgctgaacctggggcccgcgtccaaggtgcccgccggcgccctcaagcaggccaaggcggtggccgacgtcgtcgccgacctggacgcctccctgccgccgaacctgaagcacgccgtcggcggccagtggtccaccgtcgtcgacgacctggacggatcgcccggcgcgtacgggtactaccaggccggcaagggagtggtactgagcgggaagaagctgtccgtcctgccggccgcgcaggccaagcaggtcgcggcccacgagctcggtcacctgctccacaagcagcacgacctgctgctcgacccggacgttctggcggccctgaaggcctcggcgaagggcctgtccccggacgcccggaagctctactcgtactacctgacgagcgccgacgagctcgtggctgaggtctacggccaggccctgagcccgagcgccgtgacgtcccagggcctctccgccatcgagttcaacaaggccttcggtcccgcgatccaggcggcgaaggacgcgatggcgaagaagttccccgtgcccccggccggcgccaaggtcccgctcccgggcggccccgccctgccgtacgaggtcgcgggcaagcacacctcggtcgggtcgctggccaaggcgctgctgcagcagggcatgccggacgaccaggtcctgaaggccgtcctcgccgagttcccggaggcgcagaccaagcaggcgtccatcgcctcgtacaagtcccagctgaagaaggacggtctgctgcccaacaaggcctccggcccggtcgtggcggccaagcccatcccggacgtcgtgcccgtgccctcgtccggcgccgcggctgtcgtggcgcccgaggcggcggcgacccagtctgcactgaccctcacctcggcgcagctgaaggacgaggccatcaagctgatgcagaagggcatgctctccaaccaggacctggcggagaccctggcgaagcagttccccgccaacgcggcggacgtcaaggtcaccaacatcgcgacctggaagtccaactggaagaagtcgagccctaactcctacaaccacgcggtctcactctccgagaaggcgacggtcaaggaggcggtgtcgggcccggtgcagaagccgaagctggcagaccagaagctcggcggcacgtccaccctcgccctggacaaagtgaagtccgtactggctgcgggcggcggtccgcaggacgcctacgaggccatgaagtcggtcttcggggtcatcaagcagcctggcgccgacgacctcctggagctggcacagtaccagctggcctcggccaaggccgcgggcaagccctacctgaacgcggccttcaccaagccgaccggcttcgtctccaacggcaagatcgagaagtttacggcccagctgccagccagtggtaaggccgccctggaggcgtacaagaaggcgaagcagcagggcctcggcccgatcaacaccaacaagctggtcaagaagatggcgggctacgagccctccgcaacaatgaaggtcaagctgaaggaggcggcggagtacgagctcaagaagcagggcacggccaccgtctccttcaacgaggcgaccgtcgccaagaagcagggcgtgaccccgaccgcggtggacatgacggcctcccggccggcctccaccccgcgcgacggcctcccgccgcctccgaggtactcgggggcccagcgcgcagcgggcgtgcgcaagtttgccaacgggctgccgaccggcgacctggcggcggtcaatgccaagcagcgatcgatgggactccaggagctaacggcggaggaagtcgcggcggtaaaggcctatactggaaacacctaccgggcgctgaacaacgcgctccgggcgggcaagtactcgtcggacccgcacctgcaggcctacgtggacgcagcccagcacggcatgtccaagatgccgaagttccagggcgtcagctcccgcggcatgacgttcaacgactcgcagctgaaggccatgctgtccacgtaccgcaagggcgccgtggtcgaggactccgccttcgtctcgtcgtcctacggcgagcaggcggcgttcagcggcaacgtgtacatgaggatcaacggcaagaccggcgtgaacgtctcccagtactcgtactacaagaccgagcgcgaggtgctgttcatgcccggcacccggttccgggtggacgacgtggtgcagcagaacggcaagtacatcatcacagtgacggaggtttgacatggcggacgagttcgaggcgggcccggagtgggaggggaagatggacttcgccccgggggtgcccgaggaccccgacgcggcgccggagctgttctaccaggtgctgctcggcagggtctacaccctgaccaggtggcgggacgggtccacgggccggggcgaggtgcagctggccgacctcgaggcgctcgccgggggcccgatcacccgggagggctggtacgacgccctggggaagtacctgggcgcggagctgcccggctccctgtaaaagaggcccgccgcaatggcgggctttctctttctgcttgaacgttggcttgcgtgggcccggcgccggcggtaaggtgccagcctatacaccccgggcgcgacgcccaacagccagcgcgtgatgcgcagaaggagataagatggacttcgagttcctgaagaaccccaccgtcgacagcatcgacaaggtcccggagcagttccgcggcttctacggagagggcgagggcggctacgtcctgcaggacagcttcaagggcaccgccaccgcggtggacggcctgaacaagtccctgaaggcggcccgccgcgacgccgacgaggccaagcgcaaccgcccggacgtctcgggcttcgcccagatcggccagctgctcggcatcgagggcgacgacgccatgaacgccgagaccctgcgcgcaggcgtcgagaagctgatctcggagtcgaaggacggcaaggtcaactgggacaagatgaagcagtccctggagagcggcttcaacaccaagctgcaggcgaaggacgccgagatccagggcatgggcaagtccctgcagaagtacctggtgacctccgccgcggtccaggcgatcgccgcccacaagggcgtgccggacctgctgctgccgcacatcaccgcccgcaccaaggtcgtcaaggacggcgaggactacgtggtccgcgtggtcgacgactcgggcgacccgcgcggcaacgcctcgggcggcttcatgacggtcgaggacctggtcaaggagctcaagggccaccagaccttcggccgggccttcgagagcgaggcgcccaacggcggcggcaagccgccgggctcgggcaacaaggcccccgtcggcaagccgggcgagctgaccgccaaccagaagatcgccgccggcctggcgaagcgccgccacggcggctgatccagcagttgtgcaacgagtaagggcgccccccgggcgcccttactctttacagcgacagcaccgtgaggctctcccgcaggtccgtcaggacctggccgagccagttggtgcctcgccactctttcgggtcgtggcagcggggatcccgctcgtccaggccgatgccccagatgacgtccgtcgggcttgcctcgaccaggagggtgccctccgtcaggaggagctgcgcccgcagcttagggttgctggtgaacttgtgcaggctggcccgcatcacgacgtcgcgggacaccgagtcccactggcggcggtcgaagcccctgacgcggcggccgatggccttctgctcggccgggctctgggtcgccatgatctcgtccagcgcctgctcgtcaccgaagaccctcgccttctgggccatcatgtactgctcggcgcagccgtactccacgccgtcgatcaccatgggcgacgggtaccactggctgaacaccccgccgtagaacagggtgtagcggtcgtatttctcttgcatgggaaaactccttgcggatcagggggttacagtgtaccgtcagactcgcttcgagaccgcgggcgggagcacgggctcgggggcctggtgcacggacaccgcctgcaggacgaagaagcgcgtccccgggtggaggttggcgaggcgcacggcctctccgtcggcggtggcgccgttgaagtggacggccttcggcgggttcttcagcgcaggccggccggccgcgcagccgtccttgtagacgtcgccggaggccaccatgtagaatcgcccgtcggtgatttccgaggttccgcggctggggttccaggccaggtcggcgcgcttacggccggtcgagcggcccacgacggagtcaacgacctgtcggcccttctccgtcaggctcgggggctgcttgccggtcgggtcgaagtcgatcaggtcgtccgccaccaggaacgtgatgtccggcgggggcaggccgcggacgtgctcggcgctagagaagcccatggcgatcgtcagcagggtgcgcaggcgggactctggcgaagtcggggtcatgcggggcttgggcttgggcggggcaggcttgggcgcctcgacgggctcgaagtcggaggccacgatcaggaggcgatccacgccgagctgctccaggcggcaggcgattgcgtgctcggtgcggccgtgcgccctcgacagcttggtcaggttgatcttgccggcggcggccacgaggaggtcgcgctcctcagcctccgtccacggggcaccgccgcgcggggccgccgtcgggtgggcggagttgcccaccagcgtcgaccagccgcgcttgacggcgatggcgtgggacggctggcggaagcgcgagacgatcagggagaacgcggcctcggcgaaggcgtcgaggtagtcgtcggggatcaggtacaggtcttcgaagtccatgggactctccttggttggtagggacacgggcatcatgacgcccaattaggtggtacaatgccactgtttaaggggtacggcgctcctgcatgaggaccttggcgcggtcccacgcactgttccacaggtcgcagacctcctgaggcatgccgtcgtcctcgtcctcgcggccgtaggtagacggatctacgccgagctccccgaaggcggcgtccatcaccatgttggaatcgcagaagtcccccgagtggcacacgtcggggttcagctccctggagttgaggtccacgacggtgtcatagacgtcctgcccgaggttcatcctcaggaggcgcacgaaggcttcggccagcgcctcgacggacggcagtccgccggagggctgagggtcgggcagggagtcgcaccggcagtctccgaagtcgaagccctgaccgcagacgttgcacgagaaggctgccatcacatctctcccatgaccttgaggaacgactctgcgccctcgaagatcatcttgtgcatgtccatgtcctccgcctcgatcatggcgttgtcgttgagggccacatcgacggtggtgaaggatgcctccgccgcctcgatggcgtcgagcgccgtggcgtaggccatgacggtgataggggcgatctcgaggtcgcgcagcagctgcatcacctgcgcgaggtcctcgacgggcgtgtcttccaggttcttgtacttgacggtcatcacaggttcctcagttcgtcggcttcggattcgacgccggacatgtcccacaggtgggtgcgcttgacgcggccgtcggcggtgatcgccatgatgggcgactcgtcgccgagggtggggtgctcgtacaggtccaccccgccggccgagccgaagtaggtggggttctttgccatgaaggcgatagccttctcggtggtgggcttgttccgggccatgtcgtttaccagtttgcgttggtgtgagtccattatacggggtctttcggtacatgggagccccctggaagaactatttttattctttttattagatataaagaaataagggtatctaaggcagtcttaccctccctctagggtagtctgacctctaagtccttgtcgcagctgtaccgtctagggcttctaggccttctagggctgttcgtcgagccgtggccggacctgaaacctggccgatttcctgggacaacgacgcgccgaaggctcgtttcggctcagatacggcttaagtccttggtccgtaaagctttttctcgtctgaggcaggcctccggaggcccaggaggctcagattctcgcgctggaccagcgttcagggggttacgagctcgggtcgtcacggcaaagtcccgaaccatagcacgcgagcacggtcataccctgccgcgctcgctgaccctgcagaggcgtgatgccttggcccaggggtcgaatcgtcgggcgatccggcacctttcccaagcatcccaccacccgcctcccaggagaaccctaatggcatccgttaccctcgccgagtcggcgaagctggcccaggacgagctcgtcgctggcgtcatcgagaacgtcatcaccgtcaacgagatcttcgagcagctgcccttcgacggcatcgacggcaacgccctcgcctacaaccgcgagaacgtgctgggcgacgtccagatggctggcgtcggctcgaccatcaccgccaagaacccggcgaccttcacccaggtgacctcgaccctgaccaccatcatcggcgacgccgaggtaaacggtctgatccaggccacccgctcgggcgacggcaacgaccagaccgccgtccaggtcgcctccaaggccaagtcggccggccgccagtaccagaaccagatggtgaacggcgacggcaccggcaacaacgtcgccggcctgttcagcctggtcgccggcagccagaccatcaccgccaacaacggcgcggcgaacggcgcgggcctgtccttcgaggacctggacgccctgatcgacctcgtcaccgacaaggacggccaggtcgactacctgatgatgcactcccgcacccgccgcaagtacctggcgctgctgcgcgccctgggcggcacctcgccgggcgacgtgtacacgatggcgtcgggccgcaccgtgccggcctaccgcggcatcccgatcttccgcaacgactggatcccgatcacccagacccagggcaccgccacgaacgccacctcggtgttcgccggcaccttcgacgacggcagccgcacccacggcatcgccggcctgaccgccgagaagcaggcgggcatgcacgtcaagtacgtgggcgagaaggaggatgccgacgagagcatcacccgtatctcctggtactgcggcctcgcgctgttcagcgagaagggcctggccgtgctgaagggcgtgaccccggcctaatccgccggcgtcgctgatctcggttagcccgccggcgcaatgccggcgggcgcttaatgggagacaggaaacatgagcgcacacctcgtacgcctgagcggctcgcgctgcgggcagaccctgtacgacaagtccgacgccgtcatcgtctgggtggcggacgactcgaccaccaagccggccgacgcccgcgctgcggcggccgccgctcgccccggcccggacggctactggagcgacgctgtcgtggtggagctgagcgaggccaacctcgccaccgccatcccgatgcggaccgtcaactgagcaccacgggccctgccggtacgccggcggggcttcgtggcctataggccaagagaaaggagtggacatcatgtccagcaagacccagcgcttcgtcctggtgggaccgcaccagggcaagaccatgaacgtcaacggtcacgagttcgtcgacggcgagtacgagttcgccggcaacgacgggcagatcgccagcctcacccgcgtcttcggcttctacggcgccctgccggccgagcaggccgagctgcaggagctgcgctccaagcagggcggcaagccgacccgcaagcagctggacgaggccatcgccgccctgccgggcgagaacaccgacgcggactacgtggtcggcgccatgcgctcccacttcggcgacctgttcacccagggcgacgagctgatggtgcgcgaggtcgtggtcgccccgtcgggcgatgcggaccaggcgaccgtgggccagaacaccaacacgcaggagccgcccgccccgccggcgctgccgagcctggctgaggcgatcggcctgctggacccggccgccgaccaggactggacgtccaacaacctgccgaacctcgagcgcctcgaggctctgaccggcaagaagccgtcccgcgccgacgtcgacgcgatcgccgacggctacacccgcgccaaggcgaaggccgccaaggcctaagcccctgacagacccacaggagaggatcgacccatggcattcaaccagcaggacaacgacggcacggtcgacggcgccaacgcctacaccgaccccgccaccgtgcgcgcctactgggcggaccgcggcgtcgacctctccgccaagacggacaccgagctcgagcaggcgatcgtgaacgcgacgacctacctcgacgcccggtactcttgggtgggctggcagcgacgccggctccagggcacccagtggccccggggcggcgtcacctcattcctccgcggcctgccgcccgccctcacggtggcggtctgcatggtcgcgaaccgcgccctctcgggcaagccgctcatgccggaccccacgttcgacgcgagcggccagaaggtcacccaggtgacgaagaaggtcggtccgatcgagctctcgaccacgttcgccgagagctccggggccaacctggcggccgcgacgccgcagttcccggaggtcaccatgacgctgcagcaggccggcctcgtcgagtccggcaactccggccaactgtcgaggggctgacatggcgaccttcgactaccagtccatgaaggacgacgtcgacgcgctgctggccgagttcggccagtcctgcaggctccgtcgtccgggcggcccggtcgttgttgacccggtcgacggcaccgtcaccccgggctccggcccgaccgacttcccggtcgtcggcgtcataaccgactacagcgacaagcaggtcgacggcgagaacatccgccgcggcgaccggctggtctacatccaggcggtcgagcgcccgaagcagggcgacgtcttcctggaggaaagcggcacccagtgggccatcgtggacttcgactcggtcgatccggcgggcctggccctgctgttcgccctgcagctccggaggtaacgtggcgcgcttcgagcagcagctgaaggggttcggtgtcaagaccctgaagagggtggaccaggtgcgccgcgcctcggtcctcgagctcttcaagctggtgatcttcgcgacgccggtcgacaccggccggctgcgcggcaactggcagacgaccatcaactcaccgaactgggccgcgatcgaccggctcgacctgggaggcggcgcggccatgtcggaggccgtcgccaacctgggctcgctggtcgacgtggtctggttcacgaacaacctgccgtacgtcgagcggatcgagtacgacgggtggagcaagcaggcgccggagggcatggtgcgaaggcacgtggcctcctggaagcggatcgtggccgccaaggcccgggcattcggcaggtaaggacggacaatggctaccaacacctacagcgggctggacatggcgctgcgtcagggggtcaaggactccccgctcgccctgccctacgccgtgccgaacgccccgttcgacaagccgtcggaccagagtccctgggcctcggtcttcatcatgggcaaccagccctccgtcgccaccctgggcaacgagggccaggacgcccacgacggcatcctgcagatcgacctgaactacccactcaacaccggcgaggcggccgtgacggccaaggcggacgagctgactgactacttcaaggcgggcaagcgacttgcccactcgggggtcgagctcacggtggcctcgtgcggccgctcacgcgggcgcgaggtcgatggctggtaccgcgtgagcatgaccgtcacctggttcgcccgggtctctcgaaactaatccacagtaggagcgtaccaccatggcaaacggcagccgccactccatgcgctacgtcgccgagaccgtctacggtcagactccggcgacccccgcgttcaagcccatccgccacacgggcaccaccctcggcctgtccaaggagtccctgcagtccgaggagatccgcgacgaccgccagatcgccgacttccgccacggcgcacgccaggtgggcggggacatcaacttcgagctctcgttcggcagcttcgacgacctgctggaggccgtcaccctgggcacctgggtggcagacggcgccccgggcggcgacggcgaccgcctgaaggccggcacggtccgccgctccttcaccgtcgagcgcttcttcggtgacatcgcgacggccgacaagccgtaccaccgcttcaccggcgtcgagctgaacaccctggcgctggccatcagcgccaacgcgatgattaccggcaccttcggcacggtcggctcggacatgtccaccgcccaggccatcatcgccggcgcgacctacgccgcaccgacgaccacctcgccgctggactcgttcaccggtaccctgaacgagaacggcacgccgatcgccgtcatcaccgagatccagctgaacctggagaacggcctggaggcgcgcttcgtggtgggctccaagaagtcgatcctgccgtccatcggccggtcgaacgtgtcgggcaccatcacggcgtacttcgagaactccctgctgctggacaagttcatcaacgagaccgagtcctcgatcgtcttcgagctcccggacggcgcaggcaacaagtacgtcttcaccctgccccgcatcaagtacaacggcggccagccggacgtcgagggcgagggcccgatcaccctgagcatgccgttccaggccctcctggacagcgtgacccagtccaacatcatcatcgacaaggtgcccgcataagccatggaccagaacaataacaacgccgcgggggcggctggcatgaacgagttcttcacccgcggcaccgccaacgaggggatccaggtccccctgtggcgcccggacggcacgaagagcgagcactgggttcgcatccgcggcatcgactcggacgcgttccggcaggccgacgctgaggcccgccgggacgcgatccggatcgcccagctcgactcccaggtcgagcgggcggccgagatcgccaaggcgaagcgccgcctcaccgctcacctcgtggtcgcctggtcgttcgaccagccgtgcaccgtcgacaacgtggaggccttcttcgtcgaggcgccccagatcatggactccatcgacgtcgcggcgtccaagcgcgccctttttttcgcagccgggtcgagcagctcgcagccttcgcagagcacgagttcaagctcgacctgatcccgaagggaagtaagcagaccctgcgtgcgtccctcatgcaggtgtggaagacgctgaagcgcaagccgcctcagctggaggatgcgcccgagctcccggaggagctcgggtacatctgggagtggttccgtgaggtgttcgccggggtgccgctcaccttccaggagatgcaggcttggtcgcagatgaccggcaagcctctgctgggctgggaggcggacctcatcaagtccctcgaccgcattttctggaaggtgaacaaccgtggcaactgacgtcgccagtctggcaatcaagatcgagtcgctccaggtccagcaggccgaggggcgactcaagggcctgagctccgccggcggcggggccgagaaggccaccgcgggcctcatgggggccttcaccaagctgctggggccgctggccgcggccgtcagcgtaatgggcaccctgaacaagctggtggacgtgcagcgccagttcgacgtgctgaacgcgggcctcatcaccgccaccggctcctccgagaaggcggccatcgccttcgacgccctgcgcgagttcgcccagaacacgccctacgacctgaaccaggccgtcgacggcttcaccaagctggtgaacctgggcctcgatccgagcgagaaggcgctcatgtcgtacggcaacaccgccagtgcgatgggcaaggacctcaaccagatgatcgaggcggtggccgacgccgccaccggagagttcgagcgcctgaaggagttcggcatcaaggcgaagcagcagggtgaccaggtcaccctgaccttccggggcgtcgccaccaccatcggcaacaacgcggccgagatcgagaagtacctgacggacctgggcgagaacgagttcgccggcgcgatggagcgccgcatggactcgctcgacggcgccatggcgaacctgggcgacacctgggaccagctgtggctgaccatcagccagtccggcatcggcgacgccatcgaggcctccgtgcgcaccgcgaccgacgccctccaggagctgaccgacatgatcgcgtcaggccagatggaggcgctgctcaagtcgcagaccgtccagtgggaggtctggggcacggacatcgagaagtccatcgacatcgtcacccagttcatcaaggacaacttcggccagtgggaggacgagggcgagtccgtcgtcgacttcctcatcagcgccttcaaggagctgccctccaacctgcgcgcgatggtccagatcctgaccgtcgagttcgcctccggcatcgacaggatgatcgccggcgccgagttctggcgggacagcatcaaggccatcttcaccgacgacaccatcgccgcctcgatgaagcggttcgtggcggagcaggagcgcctctcccaggtccgcatggagtccatctccgcgatcctggacgagcgcgacgcgaccctcaagtccagcaacgagcagctggaggccgccaagcgcctgcgcgaggagtacgacaaggcccaggaggccaagaagaaggcggcggccggcacggaccgcctggcacagttccgcatcggcggcgaccgccagaagcccgcctcgtcgggcgtggacaaggccgcggccgccgaggccaagcgccgggagcaggagttcgcccggctcaaggagtccctgcagaccgaggaggaggccatccggtcctcctacgacaagcgcagggcgatcatcgaggccaacaccaaggcgggctccgacgagcgcaccaggctgatgagccgcctcgacgccgagcgcgacaccgagctgaagaagctgggtgcctacggcaactcggagctggagcagctgcgccagtcgctgctgaagcaggaggacgccatcagggagtcctacgaccggcgcatggagatggtgcgcgccaacaccgccgagggctccaaggcccgggcggagctggaggcgcaggtcgtcaaggaccgcgacaaggccctggccgacgccgagcggcagcgccagtccgagcgggacagcctatacaactccctcctgaccgaggaggaggcactcaagcagtcctacgagcggaagaagcagctgatcctggagagcgagtcggtgacggagctggagcggcaggacctgctgcgccgcctccagaagcagttcaccgaggagcaggcccagatggagacgcagcgcatccagacccagctgcagggcgcggccacgctgttcgacggcctcgctgggctggccaagggttacgctggcgagcagtccaaggcctacaaggtactattcgccgtgagcaaggccttcagcgtcgcccaggccgccatgtccatctcgaccggcctcgccaaggcccaggagctgggctttccggccaacctggcggagatggcccgggtcgcagccaccggcgcctcgatcatctcccagatcaacggggcgcagttcgccggcgcgtacgaccagggcggccagatcccggccggcaaggtcggcatcgtcggcgagtacggcccggagctggtgaagggccccgcctcggtgcgcggcagggagctgaccggccggtcatacccggacggcggcaaccagcccgcgcagatggcaccgcaggtgcacgtgaagaacgtgaacgtgctggacccgagcctggtgggcgactacctcggcacggacgagggggagaagctcatcatgaacgtcgtcaaccgcaacaagagctcgctgggctactaaccgaggagattcagatggccttcgcaacgggcacggccgccaaccacgtggacgcgctggacaagctgcgcctgttcctgaccgccaacgagagcctggtagccgccgggcagacctggcagcagctgcggtgggtccccgacaacctggactccgtggacacgaccctgccgttcagctcgggcgtttccctccatcgcatgttccggccggacttccggacccagaactacaacgacgacgccaacggtcagtacctgtcgtcgacgtcgttcaccccggaccagtacgtacgcctgaagatgcgcgcagcgcgggccgtgacgcggttcaccctcaaggccgggcagagctcgaacgtccgtaactacacgccgcgcaacttccggctggagtactcggacgacggcagcgcgtggtccaccgccctggacgtcaccgagcagcgcgcctggaccgccaacgaggagcgcaccttcaccgtgccctccgccacgggcgaacacctgtggtggcgcctggtcaccaagcagaccggcgactacggcggcaccctgaccggctcccagtgggagctccggtccctgtggctgtacgacggctcggagctggtgtcgtcctcggagtcctacctggtggtcaagggcccgggcctggcgggcgacgaggagatcttcgcggccttccgcaccagctacaacaccggcacgggcgagtacttcatgatggtgcaggggctgaccggctacctgccgaacgagcagtccccgcaccgccagcccggcctgcacccgagcgggtggccggtcgtgcccctctggggcgcctccatgcccttctggttcgttggcagcggccgccgcgtggtgttcgtgttcaaggtgtcgaccgtcttcgaggcggggtacgccgggttcttcctgccctacgcctcgccacagcagtacccgtacccgatggcgatcggcggctccatgtcgccccgctcggacagctaccggtacgacttcgtgtcggccgcgcacagcgccttcccgatgcccggcagctacaacagcgtctcggccagcgaagtggcggcgttcagcaccaccctcaacgtgatgctgccggacggatcctggttcgacctgcacaacaggccgagctccggcgggcagtccgagtcgtactcccggtggtccagctcccctggctccgtgctgccgcacgggatgttcgacggcaacaactcctcgagcagcgccggctacggcatccgggagaacgttggcggcggcttcaccgtcctgccatcgaccctgttccagcgtcagccgtcggggcggttcctgggcgagctggacggctgcttccagatctcggggttccagaacggctccgagaacaccggcaccatcgaaggggaggactacgtggtcttccagaacacctaccgaaccgacgtacgcgagtactgggccctcaaggcggagtgacatagacatggcatacgagaccggggccgcaacgagcgtcgccgacctgctggacaagctccggctcttctgcatcgcggcaggctggaccgtcaaccggtgggacggcgtgggccagacggcgcgcctcaacctgcagaagaacgggctcttcgtcggcctgtgctcccaccagggcacctccgccctcaacgacaacctgaacgggtacacccagagctccagcaactcctactcctgcctggcgctcagcatggccgacgggtacgacggcgcggacaccggccgaggggcattccgccagcccggcgcgcccagctacaacggctacacccggggctgcatgatctcggagatgacggctgccgtgccggcctaccacttcttctcctactccgactcggacgacatcttcgccgtcgtggagtaccgcaccggccgcttccagatgctgggcttcggcagcctctccaagttcagctcggcggccctgggcggcgcctggttcggtggcacgagcaccaccccgacctgggcgtactacgagcagagcggctacggcccggactcgtcgcagcagaacgagctgatccccttccgcatgggctaccagcggggcagcgactccgccagcttcgtgcgatgcaacgtggactccaacaatggctgggccgcctccaggtacacggcggacacgtccacctacggcccgctggccgccatcggccagtcgtactacgacgagggcctgcgccagtacaccccgagcgctctcggctggcagacggccctgctgcgccagaccgtgtacatcggccggggcaaccagttcgcctcgccctacggcgagatcgcccacatgcgccggctggagatgaccaactacgtgcccggcgacgagttcactctcggatccgacacctggaaggtcttcccgtattaccagaagggcggcgcgaccggccagcgcgggtacgccatcctgaaggaggcctgacatggcagtggtgcagatgaccggcgttttgagggtggtgaccccgacgccggacgcctcggcgctggacacctcgagcaccctgggggcatggacctacccctggggctttcccattgtggagcccaggcactcgcgcgcctcgcggctggccctgccgccggcgccccccgtcgccgtgctcgctcctccgtctttcggatcggaccgccgcgtcggcggcttcgtggatgacctgtactatcgcgtgcacatccggcccggcgtgatcgacctgggcaacctgctgtccagccagacgcgggccgtagaggtctggaacgcccacttcgacggccgcaccctggaggccatcacctcccagggcctggacggcgtgacgctgacccagcccgaggcgccgccgaccacgttcggcgccctggagtcccgcatctaccaggtcagcatctcgaccaacggcgcgccgaccatcgcgggccagtacgtcttcgacttcggcgacgaggagcccaccctgcggctctccggccgccgcgtcgtgctctggcccttcatcccccagacgaagttcagggagtccctggagtggcagacggacctgctgcaggcctactcgtccgagcagcgcctggcgctccgcacggcccccaggcagcgcttcctgtacgagttccagctcgacccgcaccagttctcccgggccaaggccatcagcacgcagtgggcccaccgggtttacggcgtcccggtctggggcgaggtcacccgcctcggcaccgtcctggagggccagacccgcctcgacttcgacgcgtccagcgccgactaccggaacaacgacattgccctgctgtggcaggacgacgagaccctgctgaccgtcgaggtgctgagcgcggacgcctctggcctggagctgaaggtcccgaccgggcgctccttcgagaacgcctacgtgatgccgctccggtacgcccgcaccctgaacgggtccgagttcgcccgtcggcccgacgacatgaccctggcccgcgtggagttcctggtgacgaacaacgtggacctggccgcgtccgccgggctgcctcagtaccgggggcgcgatgtgctcatggacaggtccgtcatgctgtccgacctgtcggagaagatcatccggccggtggaccagttcgacaacgggtccggcccgatcaccgtcgacccgcagcgcggctacccagagagcacccagaccatcgggctggacgcgctgtcgagggccgaggcctggcgctaccgcacctggctccacgcccgccgcggcaagcagaagggcttctggctgccgagctggaaccgggacctccaggtgctcaccaacgtcgactcggccgccacggccctgacggtgcgcccgatcggctacccgctctactacggcgtcaccgacctcatgctcgtgctgaccgacggcacggtgctgtacaaccgcgtgctgtccggctcgaccgacacggacggcaacgaggttctgtcgctcgctgccggcttcggcaggggcttcgctacgtccgagattgacctgctctgcttcatgcgccacgtgcgcctggactccgacagcgtcgagatcacccactcatacgcgggccgctgcagcagcacgatccccgtcatcgaaacgcccgagggagactgatgagctacgcaacgatagaggcctcaagggagcagggcgcgccggtagagctgtatgagttcacccaggggctgcagcggtgggccttcgcctccggggcgttcgaggtggtgcgggacggcgtggtgtacaagccgtccagcgtctcccgcgaccgggtcaagcagtcgacggacatcttcaagaacggcatcaaggtcaagttcccgcgggacgacgagttcgccagccagttcctcgggttctcccccgaggaggtgacctccctcaccatctaccgcggccactacggcgacccggaccagcagttcgtgatctactggaaggggcgcgtgctcagcgcctctgccgccgactccgccatcgacctcgagtgcgagccggtctacacctctatccgccgcccggggctgcgcgccaagttcgagtacggctgccgccacgtactgtacggccggggctgcaacgtcaaccgggagagctaccggcacaacggcacggttatcggtatgagccagggcctcaacgtcgtggtttcgggcgtcgagggcaactacgaggacgggtggttcgccggcggcatcctggtggcgcccgacggcgcggcccgcttcatcgtgagccacaccggcggcacggtcgtgctgtccaggccgctggccagcctcgcgggcgaccaggcggtcaggctgtacccgggctgcaaccacctgaagacgacgtgcgccgccaagttcaacaacctgcccaacttcggcggcttcccgtggatccccacgcgcaacccgttcgacggaagctccatcgtctgagaggttactagcatgatttggtggtatatcgtagtcttcatcgtggccctcgtcgcgtcctacgcgatgatgcccaagccgcagaacgccaagccggcaggcctcggggacatcaccgcgccgacggccgaggtcgggcgggccatcccggtgctgttcggcacgcgggacctgaagggtcccaatgtgtgctggtacggggacttccggaccgaggccatcaaggccaagggcggcaagaagtgacggacgaccgcgccgtggtgcggatggaacacatgcgccggctgggctactgctccgccggcgttcgctcattcttccagcgccacgggctggactacagcgccttcctccgggacggcatcgacgcagacaagctggcggagaccggggacggcatggccctggccgtcgtagaggagtccaaaaatgggcggcggtaagaagcagaccatcgggtacaagtacttcctgggcatgcacatggtcctgtgccacgggccggtcgacaagctgaccgagatccgggtggacgacaagctggcctggaagggcagctcgaccggcggccagatcatggtctgcgccccgaacctgttcggcggcaaggagcgggagggcggcatcggcggcttcatgctggactacctcaacaagtcctacggcgaccgcatcgacccgccgctggacccgtccaccacgccgatcgcggccagcgccggtacggtcgacgtcatgatgggcaaggacgaccaggtcgccaacacctacctggccggccagctcggcggcgcaataccggccttccgccgggtactgggcgtggtgctccgccgcgtctacctgggcaacaacccgtacctcaagctctgggccttcagggctacccgcgtgcacacccggcagaacggcctggcccagtggtacgacgccaaggccgagatcggcgacggcgacatgaacccggcccacatcgtccgcgaggtgctgaccgacccggactggggcatgggctaccccgagggcgacatggacgagaccgcgttccgcctggccgccgaccagctgcactcggagtccatgggcatgtccctgctctgggacacccagcaggacctgagcgacttcctggcgatcgtgctccgccacatcgacggctcgctgtacaccgaccggtcgaccggccgcttcgtgctcaagctggcccgcggcgggtacgacgagagcaccctgatggtgctggacgaggagaacgtgatccgcgtctccgacttcaagcgccgcacggttgacgagctgaccaaccaggtcagcgtggcgtactgggagaagtcgaccggcaaggacggctccatcaccgtgcaggacatcgccctagccgccaaccagggcagcacggtcggcacgaccatccagtacccaggcttcaccaacggctcgatcgcgaccgtggccgccgcccgcgacctgaaggccctgtccaccccgctggccaccgccaccctgtacgcgacccgcgccgcggcgtccctgaacatcggcgacgtgttccgcttctcctgggcggagtacggcgtggagaacatcgttttccgggtgaccaacatcgagctgggcgagctgcagagcaaccagatcaagctctccgtcgtcgaggacgtgttctcgctcacctcggcgtcctacgccccgccgccgccctccgagtggcagcccccgagcggcgaggccctgccgtcgccctaccgcctggcgatggacaccccgtactacctgctcgtccgggagatcggcgacgcccaggcccagcagctgccgaagacggccggctacgccctggccgcgggcgtctcgcccggcgggacctcgatgaacatggcgatgtacgttagcgccggcgcgggctacgccgaccagacggacctgagcttctgccccaccgccgtcatcagcgccgcctacgacgacagccccgagaccaccgtcatggccctgggtgcgacgaccgactggaccatcgtcgaggcgggcgacctggcggtcatcggctacggcccctcgaacgccaaggagatcgtccagatcgtctccttcaccgacacgcaggtcacggtccggcgcggcgtgctggactccctgccgctcccggtcgcgtccggcgcccgcctgatcgtgctgggccagggcggcgagcacaccggcatggactcgaccgagtacgccagcggcgagcaggtgtccgtcaagctgctgacgaacgcggcccggggccagctcgccctggagtcggccccgaccgacgtcaccccgatcctggcgcggcaggcgaggccctacccgccgggcctggtgcgcgtcgacggcgccaggaagcccgcgaccgcggccggcccggtgtccgtcacctgggcgcaccgagaccgcacgcagcagaccggcgacgtcctgccgacccaggacgccgcctcgatcggcccggagaccgggacgaggtacgggatgaggttcctggacgctggcggcgcggtgctggtcgctcgcgataacatcagcggcacctcggcgaccggcaacctggcgtacaccggcaacgtcacgatggagctgtactcgatcaccgacgcgggcgagagcatcaaccgccaccgccgcaccttcgcctacacggcggccgtaggtacgaccgagagcaccatcacggcgggcacctggacccccgacgaggtcatctttgacggaggcggagcctgatggcaaccatcgtagtaccccagcgatttgcccagcgccgtgacacgtcggcgaactggaacagcaaggacccggtcctctggaacggcgagatcggcttcctgctggaccctggccaggccgtcaagctgaaggtcggcgacggcaccaagaagtggagcgagctcgacttcttcgcctccgacggcaagccggtgcagctgcgggcggccgacgggtacatccagtggaactacgtcggggacacgtcctggatcaacctggtctccctggacaacctgcgcggcgcggacggcgacgacggggccgacggcaagagcgcctacgagatcgccgtcgacggcggcttcgtcggcacgatcccggactggctggcctcgctgaagggcgagcccggcgacaagggtgacaagggcgaccccggcaaccccggcacgccgtacgcccgccgcatccagcacgtggccgacaccgacgcaggcaccttcgagtgcgactggggccagtacgacgagatccggatctccctcacggccacggtggtgttgagcttcaccggggccatcgacggccagggctgcgtcttgaagctgcgccagccgccggcgggagggtgccaggtcgggctgccctccggcgtggtccggttcaactccctgatccaggcgtacgccgttacccagaccgggtcgcgcgcggacaaggttggtttcgtctacgacggtgaagacgcacgatacgacctggtctccatcgttcccgggatatagcccatggacgagtaccagccgccccaggcactgagcgtgccgttcctgttcgacggcacgtacgatccgccccaggccctgaccctgggcttcgtatttggcacggacggcggcgggggcacgacggacccgctcccgtcgaacttcatgatcctactaaccatctgaggaaaccccatgaccgtccgagtgtactccagctccgacccgagcgcgcccgtgctgaccggctcgaacgccggcgatctgctcaacctgctcaccaagtgcctggtcgacggctacggctccaaggccggcgccggctggaccaagcccttcaccgccaccaaccgtgcggccttcaagaccggcgcgggcagccgcggccggtacctgtacgtggacgacacccgaggctcgtcgacgtacgccgcccgcgtgtacggcatggacaccatgaccggcatcgatgcgggcgacggtcgctggcccaccaacgacctgatcccgggcggtctgtactggcacgtgcactacaccggcagcacctcggccggccggccgtgggtgctcgtcgcgaacgagaagatgatgtacctgtacctccagaactacccggacgccggctcgagcaacacccagtaccgggagttctactggttcggggactacgacgcgtactcccctgccaacactttcaacacctgcatccagggcaaggccagcagcagcccgaccacctccgaacaggagcccttcgtctcgtacaacgtcagctcgggtgcgcccggcctctacgccgtgaggtcctacaccggcctgggcggccccgtgcagctcggccgccgccacgactactcgctgtccggctccggcaactggggaggcaacggtagcctcagctacccgcacggccccgacggcgccctgatgatgtccccggtctggatccacgagccgggcggcacgaacatggcggccctgctcggcaagatgcccgggctgtgggccccgctgcagtacgtgctgaacaccggcgacaccttccagggcgagggcgacctggccggcaagaccttcctggcgttccgccagtacgagggtcgcgccgtcatcgagacctcggacacctggagctgaccgtggccgacctgggcgcaattggcgcttcgtacgggctggggtcgctccgcgggcccaacccctcggcctacagcagctacgcccgaccctcggcgcggcagacggccgtgccgtcacctcggcccctcatggggcggggcttcgtgcgctacagggtgccgacggccgtgccgggcaccccgtcctgggccggaggtccgaggcccgtcggcgccgagccggccgcggtgtacgcggtcggcggcacggtgaagcagaggctaaacggcgtggactcgccgctggcgaactgcctggtgcgcctgtacgccaggcggaccggcatgcccgccggcgcggccctgaccggcctggacggatccttcagggtcggcaacctgctgcccgagaccgccgggttcttcgcgatcgccttcgaccccgacggtgccccggtccagaacgccctgatcttcgacaggctgcaggccctgccgagcgtgccgggccgcatccgcaattccgcgccgagcttcaccgtcgacgtggcggtgtcctcgcagctcaccacggcgtacctggtcggcgccccggcgttctcggtcagctccggggccctgcccgacggagtcgccctcagctcctcgggcctgctgtctggcaccccgacgaccgatggcgaggcctactcgttcaccatcaccgccaccggctccatctacggcacggcctcggtgacctggtctggcgaggtcgccggcggtatcggctacctgaacacgctcaacggccgtaccggcctgaacaacgtctggtccggccaggtggacgacagcaacaccgtgctgccggcgctgccgttccagttcccgctgttcggcctgacgttccagaacaacatctacatcagctccaacagccacgtggacttcggcttcgggtcgagcgcgtactctgggctgtcgcccaccaacccgggacgggcgctgctcatcaacgcggccgaccggtcctaccagaacgtcttcgccgggcccgtgctgtctggcgcctgcttcctgatccgatacgagggctcctccaacactggcaacagcaacgacaatctgtgggaggtcggcctctacaacgacggcagcatcacggtcgtcaccggcacggtgccaggcagctcgtcgccgaacggcgcgggcacgtccaacatctcggacggcaccgcctggcgcagcgtcacgccgcccaccttcctcagcaacagggcctacctcggtcagccgaccgggcctgggggcgacttcgtatggacggagattacgccgtgaccgaccgcaacgagaactggaagtcgagctggagggtgcggcggcgcttcatgttcgccgtgtcggccttctgcatgtgggtcatcgggtacgtgctgtacaagaacctggcctccgggccggcggacacggcaatcacgatggcgttcctgacgctcatcagcatcgtcgggtcctacgtgttcggcgccacctgggaggacgtctccctggcccgagccaagctgaagaccccggcagggaatgccggcaagcccgccccggcaccaggggcatcgcagagaatggaggacataccatgagcttcgcactgggtaccaagtcgcgcgccagcctgaggggcgtgcacccccacctcgtcaaggtggtggagcgcgcaatccagctgaccggcgtggacttccaggtctacgagggcctgcgcaccagggagcgccaggcgaccctggtggcgcgcggcgccagccagaccatggactcgcggcacctgcccggccgggacggcctcggccacgcggtcgacctcgtgccgctgatcgacttcgacggggacggcaaggctgagctgcggtgggactggtccctctgctacaaggtcgccatggcggtacgccaggccagcctcgagctgaacgtgcccatccgctggggcggggtctgggaccgcgcgctggccgacctggccgaccccgaggacgaggtcgccgagtacgtgggccgccgcaaggctatgggaaagaaggcgttcctggacgggcctcacttcgagctgcccgccaacatctacccctaggagggtgacatgattccgttgggatacaagctcggcgctggcgcgcttatcggggttgctttggtcacgaccatcgtgctatcataccgccattacgacggcctggtcgaggacaaggccgagctcagcgcccaggttgcagctctcgagcagggcaaggcggcggagaaggccagggcggacgccctggaactcgccatagacaagtgggatgatgccgccaagatccaggcggagtcgctcgaacgattctccactgtccagcgtgaggctggcgaaaccacgaggaagctgacggatgtcctgtcaaagcacgacctcggcgcgctcgccagggcgaagccgggtctcatacagtctcgcatcaatgctggcactgctgatgctttccgcctgctcgagcaatccacccagggtggacccgccggcggagcccaagcagcccccgctgcccgtcctgccaaagccccagcccgtacggactgagtccgtacagtggcggctggtccaggtcgacggcgagaccctcttcgccgtaacggcccgggggtacgagtcgctctcccgcaacctggcggagacgatccgctgggccaaggaggcctcctggcagctcgacttctgccgcgacagccgccagaccgacaagccccagggggaatccaagtgaccgcacagacgcccggcccggagcagcagctccacaatctcaccccagacgaggccagggcgctcattcgtgaggctgtgcgggagacgttcctcatgctcggcctgaaggtcgacgaccccatcgaggtgcagaaggacttccagcacctgcgcgagtggcgcagcaccaccgagaccctgaagcgcaagaccctgctgaccatgctcggcatcgtcgtgtcgggcatggtgggcgcccttgtgatgggcgtcaaggagatcttcagcaagtgagccccgcggcgggtgcctggcttcctccttctccaggcatccccttccaccgcctccgggcggtggctttttctggatctcagacagtcaggccgccttcgggcggcctgactcgtcctaggccccgggcctaggccgccttggatgccagggccggcctggaatgcccggaaggcacgccgtggcagcctcgggcgagcacgaccgagccgacgaccacggcccagaacaccacgctcagcccgaccgccagggttatgcccctcgcggcccgcagcccgtcgtcatttccctcatccagctcgcacatacgatgatgcctcccagggacagttcctggaaggcatcatggcgtgaccccggcgcggtcgacgccgtcagtagacccacacgcgctggtactgctcgggcatgtgctcgcagctccactcagacttccggccctcgtactcggccttggggtcctcgacctggacgcactccttcgagtgccaggagacgtgcacgatcgggcggtcgagcgcctgcgcgaacgtcctgatgaggaggacgcccatgacgaggacggcgaggacgcagagggcttgggtgaggtagtggcgtggcatgtgggtctctccttgaaccgtggccgttactggcggcttgccggtgcggggtgggtgggctggggtgtttcggcgggcggctcgccggcggtgatgcggatctcgccagacacgtagtcctgctcgatcccgatgaacttgccgccaatctgctcgagctcctcgcgggtcacggtcaggccgccaggcgtgcgggaagccacgacgccgagcagcgcggtaacccgctgcagctgaatctcgtgcgggcagacgtcgcccgacatgaggcgggccagcagttccatcgcgtcgttacggttgctgctcatactgtttggtctcccagtttatctctacggaagtggtgcccttggcgcggcacttcgccacggcgggcagcttgaggtcgaggaccttcgccacggcgggcgcgtcctgcctcgggatgtatcccagcatctgcccgcaggcgtcgtacacggccacggcgttgcggtcgtactggttgtgcggctcccgcctgagggtgaggacctcgtcggtcctcaggtcggcgatcgcctcgcgggctcccttgtggtgcacggagcccacgatgtacgttctcatctgtgacattagccctccttcttgggctgggcgcgcgggcggttcggcaccttctcgccgcgctcgcgcatgtggacggcataccagcggaggcatgccacggaggtcttggcgccgtcgaactgctcgcggatcttgtcgaggatggtctcgtaggagtgaccgtaggggcggccgtcctcgtccttgctgatgacctcgagcagcaggccctcagccacgacgcggatcacggggcccttttccttcttctccttcgcggccttctccttcttcggcttggtgggcttggcgggcttggaggtcatctgcgccagcagcatgttcagaccgttgggctcctccttcgccttctcgatcttctccgacagctcgggggtgggggtgccggcgagctcgacgatggcggcctcagtcttgtcagcctccatggaggcgatctgctcgagcagcttggccttgccgcgcttcgcgaggctcttggggtcggcgcccttgccgctcagctcgttgtggcgggcggcgatgtctgcgatgttggattcgttggacaggttcatggtgatctccttggacgggtcggttggatcgaggacgcagtgcgtgccgtcgatgggttccattatggcgggttgtgggcgcgatagtcccaacacttgggctaccgcgcttgaatgatggggttactgtgcggcttcaacagtcttgaggacctgtcggaactgtgcaacggtcatgccattgatgacggtggcggtggggttcttctgacggacgagctcttcgctggcacccttgatggtgtacagcttggagtccttcatgatgcagaccttgcccttcgtgaggcggtcgtactccctcttcgcgaggatgtcagccgccatcgaacgcagctccacaatgtcgagcagcttgtaggcgtcgatgcgggagaactcgaagtggggagacgcctcgtcgtccatgtcgatgacggtgcagtaggccttgccgtcgacgtacaccttggcggtgaagccctgacgccactccttcacgaggtactcgacggacttgagctccaccttgaccttgcgggcttccgtgggggccgccaaggccttggcggcgggcgacttcttcatcttcgagcggtagtaggacacgcaggcggcggaggtgctgccttccgggaaggccttcttgacctcggcgagcaccgccgcgttatcgaggcccgccgagatgcccgcgcggatcacgtcagcgatggtcttcggcttcgcgatggcgaccgtggccgcaggtgcctcctcagtgggaggcacgtagtccgccgtggtctcgatcacgcggtcgaagatctccacgtggccctcctgaccgtagacgccgcgccaagtgcggccgttgtaggagacgtagccgtagtaggtgcggctgccctccttatagaggaagccgtcggacttcttgaggtcggacgcgccgaagtcgttggcatcaatccatgcggtgaacagcttggatgcgtcggcgagggttgccgccgggtggcgcttaccgccaaacttgacctcgaacatatcgtgcctcacgtgtttgcgttggtgtgaggtcattatatggggtcttttcccaaatgggagccccctccagcaaattattttgctaaagtttcgcgaaggccagtttggcgccgtacatataaaagagaagggcccccggacgtctccggaggcccctcaggtcccctgacactggttgtccccggccgtggctcagtgcacggtgggcttgctggtggtgcggccgtccttgacgttcacgtcctcgccgtcacggcggaggcgggaagcgtaccactggacggtcttgacggaggtgttcgcctccgggtggcgggccttgatgatgtccaccatcgccgggtaggtgagggcgcgcttgcggcggcccaggacgcggacctcctccttgatggtgcgggcggtgttcggcatgactgattctccttcgttctagtgtgcggtccgggtcgtcgcccggttgtcgcatgccccagtggtggagcacggagtcagtatgcgcttacgttccgagccaaaacaccatcgttccagctaggcgagcatgctgcgattgcccaatgagtttgtcgcaaactccagcacctcctggggcgtgtggtccgggcggagcaccgacatggcggccagctcctcctcggtcaccccgtcggccacctcctgggccttgaacccgggcaccaggtagcggcgcacgtcggtgcccttgcccacccgggcgtagatccagcagttgccgccgcaccgccacctctttctgtgccacacgacctgggcctgcctgacctcgaagccgagcttgccgccccgcttgggccggtcgcagcccttcagctcgagctcgaagtacaggccgttccagcacccgtccacgtccgggtcgcccgagctcaccaggttctcgacccgccgcatgtgcaggccggcggtgcccttcagccggtcccgcagccactcccagagccttacctcccgggccacttcatgtcctcggtgaagacgcgcaccttgacgtcccctatggagatctgcaccggcgtgtcgccgttgttgggcaggaactcggccagctcgccggcgtgcatgccgccgccgagctccgttggcacgacggtgatgaacgcccgggtcacgtagcccagcctgagcgcggcgagcgccagggtcgggccgccgatgagccatgcgtccgggtggtccagctgggcctgccccagggacttgccaaggccgaggttctcggcgtcgggcgcgcgggtgatgcgaaccatggagcggttcggcaggcggggcatctggtcgaaggtcgtcgacccggcgagcaggacgtcgttggcgttcgacatggtgagcaggcggaagatggccttgtccgtcttgcctgtccagcgcatgtcgtcgtcggcaccgctggccaggtagccgtcgatggatgaagctagcagcagtcgcattggttgtactcctctaggtaggtgatgtggatcccggcgagggtgagcaccgcgatcgacgtggcccaggacttgccccaccgatggtggccgaggtcgggcctcggtgccaccaggcggcggatgcccgcctccctcagcttgcaggcgcacgggaggcaggggaacgaggtcacgtagacggtgcagcccgccgtggggaacggtgcctgccggaggcagttgtcctcggcatggaccatgttggccagcttgaaggcgcggtcggccaggagcgacggcaggtcgggcacgtccggcgggaagccgttgtaccccggggagacctgccgccggtcgggcgtcacgaggacggcgccgaccttgcggtccgggtccttcgacatggccgcggccagtacggccatgcggtagaagaacccatcccactgttcctgggatcgcttggtcggcacctccatcactcaatgacctcgggcttcgggttgtacgcgggccactggtgctgcttcgcctcctcggcgtagcggaccacgtagtcgtcggggtgctgctcgacctggctcagcgtccagcccggcagcgggagctgcggcaccacgggctcgtgctggagcatctccgccgccatctgccagtgcgactcgtacaggtgggcgtgggccagcgtcacgtgcatcacgcccggccggatgcgcagctcgtgggcgacggcgtccatcaggagcgcgtggcccatgacgtcgtacggcaggccgacgaacaggtccgagctgcggaggaacaggctggagtgcagctcacccccggtgatgctgaaggtgaagctcgtcgggcaggggacgttcttctgcccctgggcgcccaggccgtcctcagccgggtcccaggcggacacgtagcacctgcggtccgtcgggtccttgcgcagcgcctcgaccgcgagccgcagctggtcccggccgaagtggcgacgccagcggtagccgtaagcagagcgaacccccgggaatgcgacacccgacttagcctcagtgccggcaggagtctgcgggtagatcggctcgacaaacttgtcccacaacggcgcgtacctggtgatgaaggcggcgtcctgctcgccccgcacgtaccaggcgacctccgccgcggcggaccgcgggaaggtcttgcggtagccgacggtcggcaggaggccgtcgctcaggtcgacgcggaacgccgtgcctccccggccgacgtggacgcgcgttccggtgcgctcgttcgcctcgatcgggctgctgaaggcccaggcgatcagtgcaccgtagacgtcgtagaacggcatgaggacgccgctcacttcgcgcccccgaggccctgctgcttcagccactcggcgtagtaggtgccgtagttcaccaggtcgcgggcggtgtcgtacaggccctcgtagttgggctcgcggccctggcgcatagccgtgatgagcgactggatgcgcaggttcttggtgtggagcatgtgtgcgtaggactcgtggccgaacgggaagtaggcctcgcgcccgcccgggacgttgttgtagtcctggcccttggtctcccgcaggtgctgcagctccagccacaccgggctgatggcctcgcggccctgggcctgctggcgcagctcctggagctccgccacgtcggacaggtcgaaggtgagcagccagtcgtggttgggcggctgccagccctcgggcttgacggcgtcgcggccgttccagccggggcgcttggacaggtcgccgcgcaccttcgccatgttggcggcctgcaccgcgtcgaacacggccagcggtggcacgcccatctcgacgaggcggcccagggcgaagtagatcaggtccaccagggcgtcggcggcctcgagcacgtcgccgtcagcgtgggcgtccttgaactcctggatctcctcgttcagggcgtcgaccgaggcgtccatgcggatgctggacaggatctccggggtgcccgggatgggcgtgtccaggatctggacgttgaactgctccgctttcaggagcatgcggctcaccagtgctgctaccagggcctggtgcgggccggtcgtgtcgatctcatccatcttgctgcttcctcagttgttgaaggtaccacgtgagcttgccgtccgtcgggtcgacgtcggtcctgccgtctacgaaaatcgcccagctgtcggcggcgtacttgccgcagccaggcagggactcaatcttgacgcttcgggggtccacctcgagccaccgagctgcgagcctggtgagagtgacggcccggcggcgccacagccccaggggccggagcgcgtcgtgcaggtcgtcgggctctgcccgggacagcgcctccgggctcgggtagtccgccatcaggcggtcgagcgcgggccgggcctgccgccaggtcgtcaggttgaccaggctgcaggcgaccagcatccagaacggcgtctccctcagccgctcctggaacagctcgcccgcttcgggctcgtcgccctcccaggcctcgaccctcaggaggcggccgtggcggcgcaccctccagcgcacctcgttcatcgggccgcagcctccctgatgccccgccgggcggcgcagaccagggcgtccaggaactggcccgaggggctgccggccagcgtcacctggcaggacgcgccgccgcgggtgacgcggacgatgaggtggtcaccccggctgaaccgtacgggctccacctggaacccgtcgcgctcgagggccgccaccccctccttgtgcgggcggagctggacgcggatgcccatgctcaggcctccgccgtcttcttggcgcgcggctgcttgggggcaaagcactggtggccctcgggcaccaggaggcgggcctgctggctgtcctcgctcagctcgtagcccagcccgttctccttgttgatggtgaacaggtgggacagcacggcggagcggtccaggtccagctgcgccatggcgtccgcgatagggaagaagcccgagacgaagagccgggccaccgtggcgcgcttgccgggctcggggatcggccggagcgcgtcctggttgatcggcttgccgctcgtccgcttcttgggctcgtagaccgtgccgtcctcgttgaggcgctgcggcttctccggcttgggctccttgaccggctcgacgtatgcgaacaggtcgaagccctcgggcaccagcaggcgggcgcagtcgtttaccagctcgtagcctacgccgtggtcgcggttgagggtgaacaggtgggagagcaccccggagcgggacagcccgaggcgggccatcgcctcatgaagcgactggggctcgtcgtgcaggaagaaggcggcgacctggccgcgcttgctctcggggcggcacgggcggagggagtcctcgacgatcggcttgccgccgcgcttggagtcgtcggacttgcacgggtcgggcggcgggggcaggaacttgggcaccgggaaccccatctcggtgagcaccatggcggccacgccgtagtccttctggaatcccagcttgacgcaggtctcccaggccttctcgatgtggtgcgcgatcttggacggctcgacgtcgaagcgctccgccgtctggagctcgccgcactggttgctgacctggaaggcctccagggagtgggggcagaggatggtggaccgcttctcgcccttaatcaccacgacgtgggcgaagccgctggtcggcgggtcggtgatctcgtaccggcgcttccagaagttgggtgcgccgccccgcacgaagtagaccttggcgaagacgatgttggctggcagcatggtggacgtccatatagagaaagggacctggtctgcaccaggtccctctatcttatggcaggggccgcgccccttaaaccatcatttccaggcgaactgcccggccgcttcggtgattactcgaagatgcccttgtcgccggcggactcgccgcgctgggcgtccgcttccttctgggccttggcttcggccttggccttgtcggcggcttccttcttggcctgcttctcggcgtccttggcggccttcttctcggccttggccttctcggcggcttccttcttggcctgcttctcggcgtccttcttggccttggcctcggccttggcgtcgcccttcagctcgcgggcggtcggcaccttctcgccgtccgagcgcagcttgttgcggtaccagttgatgctggccatggaggtcttggcttccgggaactgctcgcggatggcagccagcacttcttcgttggtcttgccgtcgcggatcaggcccttggcgatctcgccgacgcccggggccttcggagcctggtccttggtctcggtcgcttcgccggaggtctgggtgctggtgtcttcgctcatctgcatctctccttcagagataggtgttaggattggactgtcgccgcccgttcgggcggcttgcccggcgtgcgtcagtgggtgtagtttaacgccgggctaattgtcgtggagccgtcgttcgcacgtccggccgggagtatcacagctgctgtctgaacagagccagcagtcggtcgcgcaggcctcttccggctagctcctcggagatggagcgcttcgactccaggttggcgaggatgtactcgtccaccgaggccggcgtgacgtagtccctgatggtgacggtcttgccgccgatctgggtggcccgctcgttggcctggtcccgctcgatgaggtcgaacgtgtgcgagtaccagaggatgacgtccgccgccgagaggtccaggcccgcgccgccggccttgggctggccgacgaagaccttcacccgagggtcgttgttgaacaggtcgatggcctcctggcgcttcgcctgggagtgcacgttcccgtggtactcgacgcaggcgatgccggccttctccagggtgcgcaccacccggcggatgtcctcccggaacttgcaccacacgatgcacttccggtccgactcgcgcacgtcctccagcatgccctgcagcctcgggttctcctcgtcggagaccaggtcgcgcacgttgccctcggagtcgatgacccagccgctgatgagctgctggagcttgatgatccgcgcgccgccctcgaccgcctccacctcgccgccgtcctcgagctccaggatcatctccttcaggagcttcttgtactgggcctgcatgtcctcggacaggagcaccgtcctcgggtccatgagcaggtctggcatgtcgtcgacgtcctcccggagcacgacggaggcccacctggacatcctggcctgcaggtcgtcgaggttcctgtagtggtccaggcggtcgtaggacctgccgcccttggtcttctcctgcacgtagtaggcgtactggctctcgaactccccgaaggtggcgaagcccagggcgtggtcctcgagcagctcgaactggctgtacgcggccagcgggctgttggacaccgaggtgcccgtcagggtgcgccgcaccctgcagtagcgcttgagcgcccgtgcccgcttggtgcgcttcgagccgggggaccggaagtcgtgggactcgtcgaccaccagcatgcaccggcccttgtgcttctgcaggaacttcttgatgagcgcggccggcttgtcgtggatgatggactcggagttgacggcgagcaccgacaggccggactgggcccgcaggacgcggtccagggacgccgcgtggccgggcttgctcgcctcgctggcctgccaggcgtgggcgacgtactcgacgccctcccacatgtggatcggcagctggcggcgcacccagttgacgtgcacgccgttcggggcgagcaccaggatgccggtgatgtcccccttctcgtaccggtagcaggccaggtcgagcaccgacttggtcttgcccgtgcgcatctgccacagcagggcccgggcgtcgtcgtcccggtggcggtcccactcgtcctgctggtgcttgtagttgggcagcctgaatcggggcgtcactctatcgtctccttgcgtggcttgaactcttcgcccaccagctcccaccggtccatcttccagtacagcgagtcgagcagcatggcgatcttccagccgcgggcccacctgagcgccggcgtggtccacaccacccgctcgtcgcaggtgatgacagtagacgccgacttgtacggggccttctggtccggcttccagtagatcttgtatctcacttgcggtacctcattccggtccagccctccgctttcaccgggcacccgtcggcccacggcatggtgtaggccatcgtggcctcgaagtccttgacgtcgccctggtccatgtcgcactccgcgatcagttcgtcgtgcaccgacaggatgacgctgtacaggccctcctcgtggcaccttagcatggcgtccgccatcaggtcccgcgcggtcgcctgggtgatgttctcgacaagcatgccgccgtaggtgtcctggcgacgccacttcttggtgtacgggtccacgcccatgtaggtgagggcgggcttcttctcgccccagggcgtgggcttcatgacgacccgcgggtcgcagtagcccagcagcctgccggacggcagcttgcagtgcaggaagccgtcgaagcagcaccactgcaccttgccgcacttcacgacgcggcccggggtccggacggcggcgatcgccgcggcctcctggtcccaccacatcttcttgacccgccagaacttggcgcggtaggcgtcgacgatcttctgggcgaactccagctcgatgaagatgccgtacttctccgccagggtgttccggaacttgttggcccccatctggtagcccaggcccaggaccgcctgcttgcccatctggcgctcttcggcctgcgcctccttgtcgtggatcaggcggccgtagatctcggtcgccatcgccatgtagatgcactcgttccgccggaacacgtccagggcctcgtcgtcgcccgccagccagagcacgacgcgcgcctcgatggcggcgtagtcggccaccatcagcctcttgccctcggacggcacgatcatcccgcgcagggcgtgggacagcagctccatggcgtccccgtagagcatctccatcatcgccaggtcgcgcgacttgatgacctcccaggcgagcgccatgttcttgatgttgccgcgggggaagttgtgcggctgcaggcccgcgccggaccaccggcccgtgcccgcgccgtggtagagcaggcccccgtggaccttccaggtctccgggtcggcccagttctgcgccgcaatgaacttggcggtgctcgaccgcccgagggccctgacgagctccagggcgcgcctgaccctcggctccaggtcctcccgcttgagccacgagtcgatggtgccgccctgggtgttctcgatcggcagcccgttgtcgttgaaccactcgatcatgcgggcgcgctgcgtcgccttctggacccggccgtcggtgatctcgaccagctcggcgttcagctccgtgtagatgccgtcgacgatctccagcgccgcctcgatgccctcccggtcgagctggaacccgcgctggttgatcgcctggtccatgaggtacatctgcgtctcgcgcggggacaggtcgcgcaggcggtccgacacggcctcctcggcgaggacgtccacgcggcagtaggcgcacaggcgctccagcagctcggcgctctcgacccagaacaggggcaggcggaagacctcctcctcgacgtccggggtcggggagtgggcgacggccgtgtaggtcccgtcgtcgttcgcgaacaggtcgatcttgtacttcttggcgggcagcggcagggtgccctcgtcgtcgatccaggcgaccacgtcccgcttgagcggcttgcgcggcttcgccatcttcttcatgatcttggcgccctcggtgtccttctccaccttcagggccagggctggcgccagcagctccagcttgcgcggaagggagtacgccgccgccttggcggccgagcacctccactgctcgtggccgaccgcgggccagcccatgcgcgggacgcagacgttggtccagatgccccgctcgaaccaggcgttgtgggcctccaccaggcggccctccctgatccactcgaacagctcggcgagctcggggcagtcggcctcctcgacgcccaggtgcgggaaggcggggtgccacagggccgtgcggcccttctcccagtgcggcaggcggaacgccaggcacatgacctgggtcgtggggtcgagggagtaccgccaggagccgcagtccttgatggagcacgcggagcgggtttcaaagtcgatcgtcgccttgggggcgttcgtctcgtagtggatgcccgccgtctcgtacaccgaggcggaggcgatcttgaacagggccgtcttgacggccgcggctacctgggagcgctccggcaggtcagagacctgcgctggctctttgttcggggcgattaccatggatcctccgggctagccgcttactgtatcagggcggctcattgaagtccgccatcatctcccagtgtttgaatacctcgccggcgcggatgcactcatccctggtcaggttgcctatgtggaactcctcaccctccggcatgcccatcatcctggacagcatcttgtaggtcttgaagcgggacatgtgcccgtccttccagagcgggtctatcatggcgtgcagggcggacctcagcgccctggtctctctgtccgccaaggtgccgatggggtagaccgagtgcgggtgcaccccgcagtaggccccgcaggacatacacaggtagatccagggccactgcccgacaggctgcttgtagactacctcgttgcccgtcaggacgaccaggcgctcgccgcagctgtcgcatgcctcgggcgggtcgcgccagtgcttgaaccgcttcctgcggtggtatgccgagaacttcaccagtccacctcctcctgcacgatggcgcgcacgtatgcgtcgaccacggggtccgggtcggccgtggcgcccttggcgaccgccagggccgccttctcaagccggccgacgtcgatcgcacctatgcgggcctcgcgcaccagggcgttcttggtggcgtacagcggcttcagggccgtgagctgaacgcgcgacagctccgtccaccgccgaccgatcgaccggaccacctgggacagcctgacggtcctctcccccggcacgatgcccgtgtcgtcgacggccttgccggcgaagtccgccacggccgccaggtccctgaggggccaggcggcgagcgcgcacagggggcacggcagggagtgctggtggtcgtcgcacttcaagggcgcacctcgtaggcggggtccttgatgagctcgtgggggtagtagaagacgcagctggaggccccgtcgcgcttgacccacacccggccgtcgggcgcgtggaactccaccgccccgcgggcgcccttgtggaagccggcgtgcggcgccacgatgatccgctggccgaccccgaagtgctccggctcgtcggggtccatctgggtggggatcggctcgaccaggagcctgccgccggccttcacgacgcggaagggctggctctcggggatggtcagcagcttcgagccgaagccgccggtcaggatgtaccacagtacggtcttcagccagctcatgcgatgtgctccagtgcggcctgctgctcttccataggccggtgcagggtgaagccggcggccgcgcgggcgcctgcgtggaatgccccgccgtcaagctccttcttcttgaacgcgtcctgctggacgacgccgtgctcgtagatcctgtcgcagtgccgctggatggcgcggtcctcggcctccgtcggggcgatggcggagatctggctgtacacggagttgagccagccgatgtggaaggcctggcgcttgccgccgtcgcccttcatgtcgggccggcgggtcagcaggtcgtcccacgaggcctgcatcgcccgccacaccaccttgtgggcgtactcggccagcatgacgcggcccttggggccgatgtagcggacgttcaggcgggcggcggagccggggttccgctcgaagacggccttgacgccgaaggcgcgctccatcatggtggccaggttgctcatggtgcgacacttgccgaagccctcgcgagtcttgacgaccacgtcggccgtgtccaggccgtccagctcgtcctcggtgatgcccagctcggacatgatcttctgcgcctgccggagcgccgcggccgcctcgtgcggctccgggctcttcgagagggccatgcacttcttcagcttctcggtgagccgcttcctacgttctgcgtccatcttcactcctcctctttggtgaggcccagctctttggctgacgcccagattgagttgccgagctgcggggaccgcgatcccctgacctcggagcggtcgtcgccgtcgtacagcgcccagccgcggtcgtccttgaggaactggtagttagcctcctcaatgaggtccatcatgcgcttcgtggggctcacttgaaccccagcaattcagcgccccgctggagcagcgacttgcgctctgccgccagcctggcgcgggcccgctccagggcctcgcgctggccgggcacgggcgccaggacgcgggcggcttcttcacgccagcgctggtcttcgttgcgctggtccaccagggccaggttggcctgccagtctttgctcacggtctgtgctccgaaacagtgtggggctatcatgccggggctttccgccctgggacgccatcaaacgggcaaaaagaaggggacccgaaggtcccctcctggggcttacctgcctcgtcggcggtactgaccggggcggtcaggctggacccgtcagtccaggaagctgccgccgcccgaggactgctcgccctcgccgacgaagtcgtcgacggagtcgaagtcgttctcggcggcggtgcggccgctgaacgccgcgccgtcgcccagcttctgcacgttctgcaggccgaaggcgacgcccttgttgccggccttgtcgtagccgtaggccgtcagggtggcgcgggcgtagcagccgctgtagaagccgtcctcggacacctcgtcggtgatgaggcgattcagctgctggtcgacgcagcccggctgcatcttggtggtggcggcgacgaacaccatgccctcgtagccctccagctccgacttctcggcgccgtcgcggaaggggttgcgcaggccgtggtaccagccgttgccgtccggcttgagcttgtcgccgaacttctccttcgccgcggcgtgggccagcttcttcatggcctcgaactgggccgtcttgcgggccgccgcgtcgaacagcatggtgacgccgtacttggcctcgccggtgctgccctccatcgggggctgcggcttgaagatccaggcgaagctggcacggaacttcggggaggtgaccttgcggtcgttctgcttggctgctgccatttgatgcgctccttagtagcgatttgactgtttagcgatgtaggtggagtctgccccggtgccgggtctgtttgccgccgagacgcaacccgagagggaggcggtggacggcgacaccggggcaggcgctcattattccggggtctgcgtctcgtcgacaccaccgagcggccggtcgagctcctcgtcggtgaagcgccccgacacgacgctgaccaggccgatgccgtagtgccaggactgcgccgccgacaggttgtcgcgctgcagctcggccttgtccggctcgagccgcccggaggccacggcgcggtcgagggtgcgccgccaggcggccatggtctccgcctcggtgcgcgtcacccacttgtgcgtggccgacgccgggaggtcgtacagcggaccggtcatgccctgcaggtggtgctcgaacgtcttgccgccgatgtggacgatgaacggggtcacgccgtcgcggctgttccacaccttcagcacctcgggcgcgtccggcttctcggcgttggtctggatgtaggtcatcagacggaacgcctcggcgtgctggaagttcggctgcgacgggtcgacgttctccgtcgcctgcttgatggtcttcaccagggcgcgcaggcggaccacctcgcgggccaggtccttcttgccctgggcggcgaggcccctgaccatgccggactcctcctggatgaagtcgagcatggcggcgtggagcgcctcgcggtggaaggccttcaggtcctccttggtggggttgccggcgcgggcgcgctccaggcgctcctctagggacgggcccctgtcggcggcgcagtcctggatcagctcgcgggagcgctcgatctccctcaggtcggccttggtgagttcctgcatgggcttgtgttcgtgcatggtgttctcctggtaaaaagaaagggtggaagcacatcatgcttccaccccgatccaactagagccgttagtccgcgctctcctcgccgtcgtacgcgtcgaagtccccctcggccgcggccgtcgcgtcgaccgcctcccggggatcgtcgagcgcggccacggtgatgccgccctccggcttgaacgacacgcccgcgacgagcgccttgatgtgcgccgccggggcgcgcacgccgtcggccttcagcttggccatcagctccggcgggcggaccgcctcgatcttgctcggggacttgggcttcggctcctcgaacatcatctcgcgggggatgccctcggccgccaggacgtcgaaggccgacaccggctcgcccgtcacctcgtccaccaggtcctggcggaaggcgcggctcgacttcttgcgtaccagcttgccaaagcaggcctgaccgcctggggtctcgcgcaggcgccggagcacctcggtcttcgccgacttgatgaatatgtccagcagcgggatggcccgcatccggagcatcaggtcctcgtcgctgtcctcgggcccactttgcaccacggtatcctcggtgaagccgtccccgaactccagggcggcctgggagaaggcctcctcgcgcagcgccgggcacacggccgccgccttgcagaaggtgcaccactcgcccgccctgagcggggcgtcgggctcctcggtggctcgggccgcctcgcgcagcctggcctcgaacgcccgcagggtggccttgtcggtggaccagcgtcggaccttgccatcctggtggcgcgccctgggctggacgatgaccaggtccagggtctcgaaggcccaccggagctcgtgcgccttgcccagcgcgtagtacagctcctggtcgttgtcctccacctcgacgacgacgccctggccgtgcttgtagtcgatgacggagacgtggtcgaagggcaggtacagcgagacgtcgttggtcccgaacatcgggccccagcacaccctgccgtccatgtggaacaggtgccccagggggaactcgtcagtggcggcgtagtggatgccgctcgggctgacgtaggacgggtccttctcccaggcctcgaagtcgaagtcgaagccgatcagccagttgaggctgaactggcgctcgacctccatctcggcgtgcggccccatgcgctccatctcgtcgcgcacggtgtccaggtagacctgcaccgcgtccgccatgtcggcgtcgatcgggaagtcctcgtggcccgcgggcggcagcccgtcggccgaggcgtgcaccgggacggagacgtcggacgccgccacatccagtacggagttggcgggccggtgtaccgtggcttgctcggtcgggtcgaggcggacgtagccacccagccactcccaggcctggctgccgtcgagcaggcaggcctcgccgagcgcgtgcgcggcggtccccagccgtgcggccggggaggagttgttggggcgcccgtgctccattcgtatggagcccaggcagttcatccaccgcttcgcccccgacgcgtttcttaccgcgtggacgcttggcatgtcagttcaccagtgcgagctggatggtggggtactcgaaggtcacgccgcgcaggtcgtcgatcgagaagatcgactcggagcgcacgccgcggccgtcggggtaggagaggaaggtcacgtcctcgccgtccttgaaggactgcacggcccggtcggcctcctcgcggaggaccaggaaggcggtcggctgcggcaggcccttgaaccacaggaccagctgcgcggcgtccttcgggagcttctggttgggctgctcgctcatcagacgctcttcccgtcggccttgtcgatcagcttctgcagggcgtccggcccctgctcggccaggtcgctgacggacttggcgttcaggctggtcagcaggtccatggccgcgtcgttgccctcgatggccgcgtacttcttcagggcggcgcgggcgtcgtcgatggtgaccttcttcttgtcgtccttcggcggagcagcctcgggctcggctgccggcttggcctcctgggccggcggggcctcagcagccttcttggtctcctgcttggcctgcttctcggcggccggctgggaggtggtgcccgggtcggtcagcacggcggtgttgttgatggccgcaccgaagatggcgacctgcacgggctcgccttccacgttcgcgatcatcaccccgttgtcgttcatgtccttcagcacgtcgaggatggcctcgagcagggcgttctgcttcgcctggttggcgaggctctgctccatgaaactgttcacgtccattgcatgtgctccttgttgagcggttggtagggagtgacaatgtaccgtccggtgtccgggcgcggagccaccgtccgcgggcgacggcgccctcaacttagcagtgtgctcgcaacgggttacgacgcaccgcggccgtcgcattatgctcatcccgatgcagccccgagcaacaaccatgtctcactcgtcacacgtatcggatggccccgtgctcgacacacagctgtccgtgcgattcagcaccaaccagaggcgatacctccaggagcagctccggcagctccgcactgacccgaccctgaggcacttcaggtggagcgagtcggacctggtgcgcgccctcatcaatgaggctatgcgcgctagccgccagattgtgccgacccaggagtccgagcagtgacgtcactaaagcgaccgcgcacgggggacatgcgcgcgtacgtagagaacggcctgcagctcatcccgctgcaccggtacgacgcccaggacgccaagggccgccagcgaggcaagaccccgcgggacggcgcctggcaggccaaggagtacgactcccgcgcggtcatcgagaccgccgagcggaccggcgtcaacgtgggcgtccgcctgccctcgaccgtcatggtcctggacgtcgacccgcgcaacttccccgagggccgcgactccctggccgagctcgtcgccgacacgcacctggacctctccacggcgccccacacgatcaccggcagcggtggccaccactactggttcaccaagccggcggacgtcgacctgctcgactccctggaggactaccagggcgtggagttcaagtcccgcggccgccaggtcgtggccgccggctcggtgcacccgtgcgggcagcactacgagtgggacgacctggccccgtcgctcgacgagatgccggagatgcccgccaacctgatgcgcctctgccgccggcccaccagggcgcacggcgaggccgcgggcctcggcgagctcacccccgagatgctggcctccaccctggagcagctggacgcggaggacttctccgagcacgaccggtggcgcgacctgatgatggcctgccaccacgccaccaacggcgagggccggcaggagttcatcgagtggtccacgcaggaccccgagtaccaggacgacgcctggatcatcggccgccggtgggactcgctgcacgccctctcgggccgcggcggccggccggtcaccatcaagttcctccacaaggtggtccaggaggtgggcggcgaggtgacccgcgtcgacgcggccgacgacttcgacacgtgggaggaccccgacgagctcggccagggcgtcgacgacgaggtgctgcgcgccgagccgaagctcgagggcctggcgggcgtgctcgaggagatgaacgagacccactgcgtcgtgatggagggcggcaagttccgcatcttcacggaggagctggaccccgtcctcaagcggccgttcttccagcgctccaccaaggaggacttcgagaacctctactgcaaccagctcgtggagatgcacgacaagctggtgaccaagtcctcgctgtggatcaggtcgccgcaccgccggcagtacaagggcatcatcttcgaccccgagcagacgcacgagggctggctgaacctgtggcgcggctgggcagtgcagcccaagaagggggactggtccctgctgcagcagctggtactggagaccctgtgcgacggcgacaggacctcctacgagtacgtgatgaactggctcgcctacatggtccagcacccgtcgcaggccgccgaggtggcgctctgcttcaagggcgagaagggcaccggcaagggcaccctgggccgcgccgcctcgttcctggcgggatcgcacggcctccagatctcctcgcccgagcacctggtgggccggttcaactcgcacctgcagaactgcatctgcctgttcgccgacgaggccttctgggccggcgacaagtcgggcgaggccaagctgaagcagctggtcaccgagccgaccatcgcctacgagggcaagggccgcgacgccgtgacgggcaagaacatgatccacatcctcatggccgccaacggcgactgggtcgtgccggcgggcctcgacggcgagcgccgcttcgcggtcttccaggtgagcaacaaccgccgcggggacaaggagttcttcagccgcctcaacaggcagatgtacagggacggcggcatccaggccatgctgtacgacctgctgatgcgggacatcgacggctgggcaccgcgggacgacgtgccggccacgtcggccctcgtggaccagaaggtgatgaccatggacgacgtcgagcggtggtggtacaacaagctcctcgacggcatcctcccgaacgcccgcagcgactggcacgagggcgcggtcaccatcatcaaggagcacctccggtcggactacgcggagttcgccaaggaccagagggtgtaccgccccgccgacccggtggccttcggcatgcggctcaacaagctggtgggcggcaggctcgagaacacgcaggtcaagccggcggacgacgactacgcggtcaaggtggaccgcatgggacgcgcctccgcgtcgaagctccccagcctggaggactgccgcgccatgatggaggccaagctgggcagcaagatcgcctggcccaaggacgccctcgactgatccgggggccacggtcggccacggtcggcgggagtacgagccttctgagcctactgaacgccaggctcagacggccgtacgagccgtctgaggcttacggatcaaggacttagctccggaatctgaggcagacggaccgtacgaggctttggctcgatgttgtaccaggaaaaacgacaccgataccatgacggcaccaccaccgagatgcctagacggtccagaacctcagacagttgccgaaatctgcatcaaaatcatagttttatcttatctagatctttttaataaaggtttagattgtataagcctttaaaacagatcttcctgctaaatccactaatctaggctttttgatggacacggccgacacggtccgccctgggcaacacggccggcaaaccggcggggcaattccccgcgatcggtccgaccgtggccgagcccgggcggtggccgagacggtgggcccctcaaaagcctcacgcagaaatcgtccaggcgcggtccccggagcctcgtgcacgaggaaccggcgggtcggccccgggagaccgctggcttactgcccggcctgggcggcggtaccatcggaccattgcaccagcacagcacacggagcgcctagtgagcgtcaagaacatgaccgaggacgagcgcctcttcctcagcgagcggggcccggtctcggagctcgagctcgtcgagtgggagctcgagggcctcaacacccaggagcgcatgtccgccgagcggcgccgcctcttcctgcgggcgttcgcgctccgcggcatcgtcctggacggctgccgcgcggccggcgtgtcccgcggcgccgtggagcactggagggagacctccgagtggttcaacacgatgttcgagatcgcccgcgaggaggcggccgaccgcatcgaggccgaggcgttccgccgcgcggtcgacgggtacgacgagccggtcatctaccagggcatgacgaccacggtcatcgacaaggtcaccggcgaggagaagcagctggtcgtcaggaagtacagcgacgccctgatgcagaccctgctgaagggagcccgccccgacaagtaccgcgagaaccacaaggtcgagcacaccggcgcggccggcggcgtcctggtcatcccggccgccatcgacaaggacacctgggcccaggaggtgcagcggcagcaggccaagtacgccgggaacaacgagggcggtgacgcgcccccgcccgcgggataatcgcagagcagcacacgccgggcgcccaacagggcgccctttccacaccccgagagatcaccatgtcctacgaacccgtacccaccggccgcatgcggctgagagcgcagcccgccgcgggctg

SEQ ID NO: 14 - DNA, 61291 bp, unidentified
  misc_feature 1..61291: note = the genomic sequence of a bacteriophage
  source 1..61291: mol_type = unassigned DNA
ttgacgcacaaccgcatcgggcacccgcttccacttgcggccctggatctccagtgtaaccccgacgggttgcgtcaggactttcaacttatcgataacaggcatcactgcgccgacgacacccataagttcgacagcactgtattcccgcgtgcgcgatggaccaaccgacagctcatgcttcgtcggatggtcctttgacacctcgacacgcaccatcgaatcgggcgaggccgggaatactacggatgccgcgcgtccattccagttctcgttcgtccatgcacggtgcgccaccgtctcattctttaccgcttcggacacgcaaaggatgatgtcggtaccgagtacctttgactgattccagttcgggcgcgtgaatgcgtggtcacactgctcgcgcgtgaagacctgtgcgaaggtagctgcgtccattgttgcgatggtgctgtagcggaacggtgtgccatcctcgaccttcacgatcacggtgtagaagcgttggttccagcggctgacatacagcacacccgcgagcgtgcggtccttgtgctccgcttggggcataacttgttcgcccttgcccaggatggtgtaacggctggagatagcacgttcgaaattgttgttgaggtccatcttcatgatctcaaccagacggtccatgtccaccagcttgagctcagacaggtcctgcaacaccgcgtcgccgtccttgttggacaggaaccattcggtattcggctgcgcacccatgaccgtctcgcccggcttcagctggcgcagtttgatactgaacggcgaagtaggcccgaacagcgcccggatctgttccaggctgtaggtgccgatattataaaaaccatcatcgggatggaacccgcgctgcgtgtaatagctgatctgtgacattgtagtgtgtccgtagaaggttgtggttaaatctgaaccatcgtcaggcaccgaccaaacacggcacctgtgtcgatgtacttgacgttgccaagctgcttgacgtcacgcacaggggtgtgcccgacgtacatggtggtgatgcccttgacgccatcttcgataccgattgtgatacgctcgcgagaccatagtgcagtctcgaacagttggtgcaaatgcgacttggaacgcgggttggcaagctgctccgtgaagtaggtccagtctgcacccacgtcagcgtgcaccaggccgaccaacccttgcgcagtttcgatctcgatacacagcggcaagcgatcgaatagttcggcatagttgtggcgctgcagcacactcagctcaaagaaccagcgcccaccgtttaccaaatagttaccaaggtcgtgcctccctgcggcaacaccgatcgccatctgctcgtggttgccgcgcacagcatggaaccagggctgtgcaagccagttgtatgcgtcagctgactgcaaaccacgatcgaccagatcacccacactgaagatgcgatccacggaagggttgaagttgaccacatccatttgctgacacagcaggtcgaagcaaccgtggatgtctccaaccacgaagtcacgaccggcttggttcatttggaagcgttgtactaggtgcgtcattgggattcctggaagtaggcgcaatgcggatgctttgcgtgtgcgtgcaacttaacacgtgttgcgtatgggtgcaactggaagggtcggatgattgtgtagtagggatgatgtggaggtgtgctggtgcgacgcggtggtgcggtagcggggtggtgtgcggtggtgtgcggtggtgtgtgtgtgtgtgacggtgcaggtattggtgggcgtgtgcagtgcaacggaaggcggttaaagctggacctaaataatgcaggtgaaaataaattatttgcgctttataaaattaacaactttatcgggggtggcccccactgtctagtggcgatctgtctacatcgggtcacgcaattttttcctgctattagatgtgatgtacgatatttaaggatctatataatgtacataatattaataatatatatatttaaaactatgctgtaggtaagttgtaaacggttacagaaattcacccataaagccaacaaaattatttgagccggacttcgcgagcacgattgatgcttccgatgcatcggaccgtcaactgaagtgcgggtgaaatgcgacctgactcggtctgatgcctcaccgaagtgccaccgaagtgcaggtgaggtgccagtggcagatcggaggtacgtcggttccgtccgaatctgctggcattcgtgtggatatcatgtggataactcacatcgatatcgtgagatagctcacttcccacccttgcaggcggtgaccgcagcgacgcaccatcgtatgcgtcacgaatggtggcagcgaatcgcggaaggcgtaggccgacgttagagagctgaagcgggctcgctgaacgagtttcattctgttcatgtcagttgaagtcgtaggtgaaccctgcatcgtccagcatgccgagtgcgtggttatagttgatgggcgagatgccggaaaggtcaccagcgttccgaaccacccatgcctgcagccggttccaatcgttcccgttgtaggaagcgtggacgtcgccgttgggttcgtagatggtggcgtgcattgtggtcatccgttgcgttggtgtaggtacatagtaggacgtgacgcagttcggtgcaacaggtgttaagcaggaaattcttaatgcgtcactagacgttcagatttgcgcctattcaggatgtgggccgctgtatgggcgtgtaggcccgacttcaggtcactgcgacgttagtaccgaaaatagatatccacattttgcatccacaggttatccacagaagtgacggttgcaataggacgcaaggtgtgctagacgcgcctgcgcgcaccttgttattcggtggacatgcgtaaccttaaccgtccttaaatgaaatcgaaaacaggtgttgtatccctgaggggttgtcgctatagttacatcactggggcggtaagcgcaccagcccaacccaaagaggctattccaatgttcaagtcctacagcagcaagtccgcagcaaacaagggtgcgattcgtgcgttcggtcacgaagttaagctggatcaagtcgacggtaagtggggcttccacgtggaggacgcagcaccggttgcaccggaacccgttgctgacgcggacgggttggagctggaagtggaaaacgacggtgacatcgaaggtacgggtgacgtcgaagccgatccgctgccggcccagcccttcaccaagtacctggagcagaagcaggttgaagctgaacagggtgcagccgcagctgtcaacaagagcgcgcaaaagggtgttgacctggccagccgcaacctcaacatcgaaaagcagcgcgaggagcgcaacggtgtgaagcgcccgtcggctggtggcttttgccgcgccgtgtgggacttctgcgacgaaatgaacagcggcggggtgctgcccaccgcagccgatgtgcgcaaccaggccgacgcgcaaaactggaacgtcaacaacgcttccatcgaatactacaactggcgcaagttcatgggtatccgcggtcgccagaaggtgcagagcacccctgcgcaggatgcctgataacaacatcgcatcaagtatttctgataaaggggttgcacgcaggtgcagccccttttacaatacatctacaccaaacaggacacacccccatgcttagcaaagaccgcgatgcccaccgccagctgtccacccacaagggtgcagtgcaaccccactaccgcatccctaagcgtgatgctacctaccagtggaagcgtctgggttgggtagcacttacatgcctgctgtttgctatcattgcgggcatgatgctacatggtgcagctgcataaaccctagcttaacgtatcagtaaacacttgttgcatcgtaagcccacctgggctaccatatacccataccaaccaggacgcatcccatgaaacagttcaaactccagtacgccggcgctaccaccccgagcacctatgcgtatggtgtggttgatgtgcagtccgtcagcagcgccaatgacacggacgcagtgctgctccttgaggttggagggaagcacattgatgctgatggtgatacctgggagcgcgtgtccgacctcgttcactgaaccattcagggtcgcccggaccctccccacccccgagtcggattaatcgagggtgggtcgacagcatcccgacccgtggaccggctcatgattttagatcgaacatctagttcctacccaccatccagtagaccttcccatgtctcgaccgcgcaccctctacagcatcacacccatccacaaggactactccaccgcagcgcgtgcgtgctggttgcgctacctccgtcagtcgttgctaggcatggcaccagcggttggcgggtacgagacgttcgaggatgcgcaggacgcactcgatctgatcgtgctgcgagcagccaggtacgacccgatctatctgacaggcgatggtgcgagcgaagtaatcgaccacctccgcatccaaccgtacaccctgtacctgccaacctaacccgaccacagtgtggtcataaggagtaagctgtggaaaatgtgattctcgcttatctggtctcgatcgtctacagcgccattggaatgctgtatgccgtatatgacaaccacaagaagggactcccgctgacggtcggggatgtgcttgtgttgctcctcatgatcgtttttccgttcttcaacgccgtcgcagcgtcggtattcatgatcgagggtttgcgagataggatgctgccacgggtgcagcacatcttcgatttccaactgctgcgcaaaaagaaggattgatccatggaactcgaaaagacatacgttcaggaattcgatcagaacaatggtagccaccgtctggtctgtacggatgggcggaagagccgctgggccgattacagcatgggcgctctgcttgacgaccgggtgagcttgacctcctattacatgccgatcgaaggcgtgtatacggtgcagcagttcgccgaagccgcttgtgtgggtgtggacgatagcgatgactgacatccttacccgcaatgccgacaagatcgacatgttcctcaacacgcctgactatattaccgcgtggaatacggcgatcgcagtgcgcaagggtgtgttcgtgctggattacacgacgcatgcgccgaaattgcacatcgctgcgcgcaattgcacagccgaagtgtggcaggtgatcgacacgcgtcggaaacgcgtgatccgtaaaccgccaactgacccgacgttggtgctgttgctcgacgacatcgtatcgcgtctggaaaagttgggcgcgggtctgactttttgctggcagcagaacgagcagcgccagaaattcgcgaagctccagatccgatctgtgcatagcaagagctatgtcgccacactcgctgaggtgaagcgtggcggcgtcaagagtttcggtgaatttgaactcacggacaaatggtgaccacatgcagcagtacccgatcgaccatgaaatgctgattttcgctctggtagtgcaccaactggtcgcgaccgccattgcatttctgattcacagcaagctggagacgctgctggaccggcagtatgagtcgttgagcgaagtgatcgcggacattatcatcgacttcctgatttgctgcatcccgatcgtcaacatcgcgatcattgtgggcgcagtgtgggactattctttcaagaaggagaagcaagatgcgcagtagattcgagttccatggcatgcaccacaggggcgtcaccccaacgatgcacgaaagcgggaccgcatggagaatcgttccgcgcgagtcgcacgcgttgcgcgacaggcttcgtgtggttaagcaggggtgggcgcagttcgagcgcgatatcgcaatcggtcgggtcagcgttcagatctccggtttcgagaccgagaatgccgcattgcacgggctgaatgccctgccgttcaagattgcacgtttctgcatggtggaagcgtatgtcacggatcccgcgtagtcagcgcgtcgtgagttggatcgtcggtgcctgctgggcgattgcgctcgcgggcatccttttatcggacaagctggagtcacttcttaaatgagcaccaataagatcgttcttacggtggtctacgaggactatcacgtcgatcagttgacgttcgatgctccatctggttgggacgtaccttccatgctggggcgaggtgagctgggtgcgcgcattgcccaagagggaaggagcaaggtgcgcaatatcgctctcaccatcgacggtcaacctatcaccatgaacatcgctggtctactggcggacggccttggtggtttccctgttgtgtacgatgatgtcgctgcgcgggagaccgttaccgaaacgttctcggggaatttcggaatggccaagatcggtcgattccgtcctttgcgcatcaagtccccgccgaacaccccactcgggggatggtgatgagggtcctcgttcggttggttgggcgcagttactggtgcgagctcaggaacctcgtgctagtgcataatgccctgccgtcgactttgggtggcttggaccggtttctgcgcttcgagaatcagctctgggtgcgtagtagcgaattcaagaaaggtgccctatgggtgtcgtacgtgcggtcgattccgaatccaaaccttcccctggaggaccaaatcgatattgaccgcagcttcgtgaatatggtgcaaacgtcgctgaccatacagagatgggatattgaatccgatctgttggtcgagcagcaccctctgtgtgaaatcgtagggcaggttgatggtctgctcgccgctgttaaacgtgatccaagatggaaagtgatatgagcgaccattcgcactatttcaaagacgtgtcgaaactgcaaacgatcgatgtgtatcgggtctcgacgctgttcggcgtcacggacccgtgtatccagcacgcgatcaagaagttgctggtgccgggcgggcgcggtgcaggaaaagatatcgaacgggatgttcaagaagcgatcgattccctggaacgctggaaggccatgcggaaagaggatgcgagcagcatacctccggccctgcctgttccggttccagcgaatatcagcggtatgactgaggagggaggaaaactctacctgaacaagaagtggcaggatagcgaacttcgaaatgtctacggttgggatggacttacttatatcaagaattttgatttctacgggaacttgctgggaatcggcgatccattgcgacgcgatctgtcgctgtaacccagcacgggccgcgcagggccagcgtgcgtaatgggggtatgctaccctgcgagcacgcacagcgggccccgtgctgcggtataccggggcccaccgttgccacccaggccagcgccacgggtgcacctaaccggagagcaacatgttaaagcagcttgatagtgaagcgtcggagcgagtcaaactgtatcgagagaacctgaacaagctcagcggcttgtcgaaagcgcataacgcgatgcagagcttgcaattggatttcgatgctctgggcaagatgatcactgaatcggggtctcgcacgacaatggcgaagttcacccgccttgaatccaagctcaagggtctcaccgaacacaccgagcgcaagatgatcgcgatcgacaacttcctgcttgacctcatcgaagggtataagtgatgggtgccaacccccgaaccaaaggccagacaggtgagcgcgaagtcgcgaatctccttaacaacgtgatcaactcggctttgcaggagtgcgatataccgcctccgccgaagccggttgtgcagcgtcgccagaatcaatccgccgtgggcggttcggatctggataacaccttcggcatcgctgtcgaagtgaagcgccaggagcaactgtcggtcaatacgtggtggcagcaatgcgttgccagcgcgaaggataacgcagagctcccggtcctgatttaccgcaagaacaagatgaaatggagtgtggtcatgtttgccgacattccgctcaacgctggttcccacatggcggggatccgggtcgaaattaccatcgaagattttttgcgttggtaccgcgcctatgtcgtacagaaattgcgtcagggcatggtgcctcgcgtctaggagaaaatatggaacagtgcaaagcgtacccccttgcctggggtgcaaaagtcgatgacgcgttttctcagcgtgtcctgttgatgggtaagtccttcggttggaaccgcgatcaggtgagctacctgatgtcatgtatggcctgggaaagcgcggagactttctctccgaacatcaagaacgcggctggcagcggtgcaacggggctgatccagttcatgccatccactgctatcgatctcgggaccactgtcagcgctctggaaaagatgtcggccgtggagcagttggattttgtccagctgtatttccgaccgtattacaagcgcaccaagacgctgtccgatatgtacatggcgatcttgatgcccaagtatatcggccagcctgaggagaccccgattttcagcggtggcatcgcataccgccagaactccggcttggacatcaacaaggatgggaaggtcaccaaagccgaggcgacatccaaggtgaaagccaagtacgacaagggtctgaaagaaggatattacgcgctgcttgcgtgataggttagccagtgttaatatcccggcagggcatggtcctattcattcaacatccggagtgtttatggctatgctcggtcggggtatcagtgccctgcttgaccacatggaggcaggctgatgtggatcttagccgctgtcccgaatgtccagcaggttgctgaagctgctcgcgtagtacaacagaccgccgacggaatgaatggccccacatgggtcggttcaatcgtcggtggtttagtgctggtgtttgttgccgcacggcctcttatttcaaagcttcgtcttggcagtgcgatggacggggcgcagatcgatgctatcgatcggttatcaaagctgcttgacgaggaaaggaaggcgcgccatcaagccgaagagcgcgcagacaagtttgcacaggagcggaacgatgcaatctcaaaagtgggaaggcttgagggtgaagtcgctgcccttcgtaccgaagtcgaaaacttacggaagatgcttcttcctaagcccccctccgtctaggagcgttcagatggtccttcccaagcgtctcgagttgtttttcatccgccatcaacatcgcttggaagaagcgaaaggatgggggttagtcctcacgattgtgctggcgtcaacaatgatcgggtatttcgccggtcgcatggattcgcgcgacagccacgtcgccgaacttacccgcatccaagctgcaagtgcagcgcttctcgccgaacggcagttgcgggtgcgcgagcttaccgatcgactggatcaccttacggtgaggtcgaccgaagccgctatcacatcggccgaagcggcgcaagctacttccaagctgatcgacaaggtcaacgctgacgccgctcttaaggaaaaggggaagaagaaatgatccgaactgtccttctggcagtactcctgggcgcgatcgctggcgccggaagccattggtattttatagccaggccaacactcaaattggcggaggagcagagggacacagcaaaggcccaactcgtcacctccaacgagaatgtgattcgggcacgcgaggacgcaagaagcgctgaagcatcgcttgaagcgttacgcgcacaaggtgagctgcggaccaagaccgccaacgaagcattggcgtctgcgcagatcgccaaccgaaatatcgactccgcaatcaagaagatccttgccgagcgtactccggcaggggttgagccttgtatgtcggcgtctgctcagttcgacctggagcttcaaagggagcgtaaaaagtgagaatcctcacgatcgccttgattgcatttgctctgaccgcctgcggtgataagaacttgaaggccgaggattacgtcacgcgcaatcgttacgtggtgtcgggctgcgaccctgttgaaccggtcgagcccgcatgggtagtggacgagctccccctgggcgctcccatcgacacccagatgcgtgcattgcgcgctgaccgcctggcagctcgggcttacatcaacagcttgctggctgccatccgcggatgccgcacaccgcccgagcctgcgaagaaataaaacatctattgcacggttcagtttgattccctatactccgagcaatcgggcaagttcctcggagtacccacatgagcgccaacgaagactacggtcgtttctggaacgacgctctaacgagcgaaccgtcccagtctgagcgccagatgctggatcgcttcatcgaggaatacaaagtcgatagcaaccactatgcagccgcgctgcggtgtggttatgggtcatccgtcgcgggtgattattccgccaagtttatgggtgagccctacgttcgacgcgccatcaccgcatgggagatggagatgtccgatcctgagaaggcttcggatttcgagcgccgcaagatcctggcgggttttcaccgcgaagcgaattatcacggtcctgggtcttcccatgctgcgcgagtcgctgcgttggcaaagatcgcatcgctgcgggatatggacaagccgatcaaggttcagaccgatgcgacgacgcgcggcgggatcatgatgatccctgctatcgctgatgtgcaagcgtggcaggcagcggcatccgcttcgcaagaaaagcttcgcaaggatagcgaggtgtcatgagtttacctgcgaaaaggatagtctggcaacctcttgcaggctcgcagactcttgcgctatcctgcccggctcacatcattctttatcacggtacccgtgggccgggcaaaacagattgccagttgatgcgctttaggcgccgcgtcggacagggttatggtaggcactggcgcggcgtcatttttgaccgcgaatataagaacctcgacgaccttgtttctaagtcacttcgatggttccccgaactgtatgacggcccgaagggtaaggcgcggttccttagttcgaagtccgattacaaatgggtctggcccgatggtgaggaactcatgttccgtaccgttcgtaaagagtcggactattgggggtatcacggtcaggagttccctttcatcggttggaacgagctcaccaagtatccgacggatgcgttgttcgacatgctgatgtcgtgcaaccgatcttcgttccgcccggaagatcacccagtatacgacgaggacggcaacttcctattcatgctgcctgaaatcccattggagatttttgcgacatgtaacccattcggcgctggccacaattgggtcaagaagcgcttcatcaacaaatcggagatgggcgtcctgcacgccaatgtggtcaacgtcttcaacccgcgtaaaggcatccgcgaagatatcactaagttccaagtccacttgttcggctcttaccgtgaaaacaagtatctgagccctgaatatgtggcggagttggaaagcatcaaagacccgaataagcggaaggcatggttgggtggtagttgggatgtcgtgtcgggtggtatgttcgatgacgtttgggatgagacgcagcatgtcatccgtccattcgtgatcccgatgagttggaagatcgatcgttcgttcgactatggttcctccaaaccgttctccgttggttggtgggctgagtccgatggtagcgatgttcaactggctgacggtcgctgggtcagcactgtgcgcggggatctattccgtatcgcggaatggtacggtttcaatggtaaagcaaaccaaggcctgcggatgcttgcaaaagacattgcagcaggtataattgagcgcgagctgaacttgggtatccacaaacgagtccgtccgggcccagctgacaacgcaatctggaacgtcgataacggtaatagcatcgcggctgatatggaaaagccagtccagatcgatgggaaaggttacgcgggtgtcgcatggggtcgttcagataaatctaagggtagccgaaaagcaggttgggaagtgatgcgcactttgttcgatcaagcgcgcaccaaattcatcatcgacaagactgggaagaagattcctgttccgcgtagtgcgccgggaatgttcatttttagcacttgtcgaaattttgtagagcagattccagtgttaccgcgcgatgaagaggatccggatgatgtcgattcggaagccgaagatcacatcggtgacgaagcacgttatcgcgcaatggcaacccgtatgggtgcccgcggcggtcgaaccgtaggcacctgaggaatacatcatgctggccaagacatacgcgcccgggtttgctgaataccgctgcgaatgcgatcgagtccaagatttttacgaaggctcgaagaaagtcaaagactctggtgtgcgttacctaccccctaccccagggcaggtattcgatggtatgaaaatcggggaaccgggtcgcgccaactacgatgcttacaaagatcgagcggtgttccccgactacgttagtgaagctgtcgagatcatgctgggcttgttgcaccacaaggacgcgaccatcgaactgcccgccgcgcttgaaccattgcgaaagcgctgctcccccagcggggagtcactgctcagtctgctgcgccgaatcaacttttaccaattcatgaagggccgtgctgggctgctggtggatttacctgatcaggcgcaagtcggaacgcaggtactcccctatatggcgctatacgccggtgacacgatcatcaattgggatacgcgaagcttcgacggtcagagcggcgagctgtcttttgtcgttctggacgaaagccgcgatattcgttccgatcgctttaactggacacgcatggaacaattccgtgtcctggaattggatcaatcccgcgtttaccgtcaatggttgcagaacgaccaaggaaacacgacggaagaattcacagacgagactgcgatccggcctatccttcgaaaccggcagctgaatgaactccctttcttcctgtgcaatacgaaggaccgcgaagcaagtcttgaccgtatcccgctgacacccctcgcggatatctgcgaaacgatctaccattcggaggccgactacaggcacaccctgttcctgcaagggcaagacacccttgtggtcattggtgggccgaagggtggggataacccggatgacccggatgcgatccgtgtcggttctggcgctcgaatcgatgtcgatatcggcggtgatgcaaaatatgtcggcgtcagtgcaaacggtatttcagagcagcgcacagcggtcgaaaatgaccgtaagcgcgcatccatcaaatcggggcaactgatccagagcgctggttcgcagcaggagagcggagacgcgttgaccacacgcttcaccgcgcagacggcaacgctgaatcagatcgccctgactgcttccgattgcttgcaggccgcgctcaagtgcatcgcgcgctgggtaggcgctaacgaagaagaagtcaaggttactccgaacctggagttcgtcgactttggtctgaatggacaggacttcgagttcctgctcaaggccaaggagttgggcttgccgttgtcctatgcgagcttgcacgctctcatggtggataagggcctcacgctgatggatttccaaaacgaaatcaagatgatccaagaagaagctgcgctgacgaccatgctcagaatcgctgctgcggatacggatcgaagagaacaagcaaaggcggatgcccagaaggaagcgcagaagtccgcgccgacacccaccaatgccaccgaataatctgagcatgtcgctcggatcacaacgccgcatggcggcacggagttgaaatgaaaatcaaacccctatacgattcgcaggatgatatcccggctggcttcgaagagctctataccgagcgcgccggcaagtgggaattgactggtgtcgagggtatgaagacccaggcggatatcgatcgcttgcagaccggtctcaccaaggaacgggaggcccacaaggagaccaagaagaagttttcggtctttggtgatcgcgatgttgaagagattgtgaagatcatcgacgaatacccgaccctcgttgaagcatcgaagggcaagctggacgatgccgcaatcacgaaggaagtggagcgtcgcgcaaatatccaagttgcgccgatcaagcgtgagctggaccaggcgcgcgaaaagctcaccctgaccgaaggtcgcgtcaaggaattcgaaacgcgtgaagttcagcgcaccatttccaagtcggtgaagatggcagccaagaaggctggtgtcgtggattctgcactggaagacgcttcgatgctggccgaacgcctgttcgaggtgacggaggacggcagtgtggtcacccgcgatggtgtcggcgtcacccctggcatcgatccttccgcatggttgtccgatatccagaacacccgaccgcattggttcggtgcttcgcagggtggtggtgcgaacggtagtggttcgcgcggtgtcaccggtaacaatccgttcctcaaggcaaactggaacatgactgcgcaatcgcagcttgtgaaggaagacccggagaaggcgaagcgttatgctgcggccgctggaacgacggtgggtggcctcccgaacaaataatcaaaccgttaatagttgcaatcgatagtggcccgtgctacattgctgatcatgtggtatgggccacatcgttttaggggcgcgccatggtgctgtgcttcgagttgaacacacacttgaacatcacagctaaccaggagaagccacatggctgccggtaccgtccgtctttccgacctcatcgtccccgaggtcttccacccgtacacgcaggtcttgacgacccagctgtccgagatcctcaattcgggtgcagtcaccagcgacccgcgcttggaagccgatctggctggcgcaggcctgaccttccacgaaccgttcttcaaggacctggacaacgacgaggaaaacatctccaccgatgacccctcggtcaactccactccgaacaagatcggcaccggacaggaaattcaggtccgcctgtcgcgaaacaactcctggtcctcgatggaccttgccggtgacctcaccggtaccgatccgatgcaggccattgcgacccgcgtgtcgtcctactggacccgtcgcctgcagctcgcgttcattgccacgatggctggtgtgtatgcgcagaacgcgaccgcgaccaatgcggaccacacccagaacgacatgacctacgacatctccggcactgcatacgccgcgggtgtgaccaacttcagcgccgaggcgttcatcgacgccgcgttgaccatgggcgatcagcagtacggcctgggtatggtgctggtgcattcgatcgtgtacggtcgcatgcagaagaacaacctcatcgatttcattccggatgcggtcaacggcaacgctgcaatggtcccgatgttcctgggccgccgcgtcgtggtggatgacggcatgccgaatgccggtggtgtgttccagacctggatcttcggtgcgggcgcggttgcaatcgctcgcggcgctccgtcggtgccggtcgaagtggaccgcaagccgtccatcggtaacggttcgggcggtgatgttctgcattcccgtgtcgagtggatcatccacccggtcggtcatgcgtattccgcgactccgccggccggtggcccgtcgaacgcggcgaccacgggcaacctggccaatgcagcctcctggaagcgtgtgttcccggagcgcaagcagatcaagatggcgcgcctcatcacccgcgaattctaatgcggatggacatcggagggctaatcaccctccgatgtcgtaactaggagattcgcatgccccggccccgcagaattcgtcattctcgtctcccccgtctcgacatcgattcttatctcgtccgctggatgaccaagcaagccacccggcttgggtcaactgtggctgcgatccatgcacgcttgcgcagcggcgaaacgtatcaaaaaatcaacagctccacaggcggtgcccccgtcgttgaccccgttcttcagatcagtggcacacccacggtcgtggaaggtggttcgttttcgttcactctgaccctggataaggcggtcacggccaaccgtaccgttccgctgacctacggcggtactgcgacacgcaactcggattataccgcaccggatagcatcaccatcaacagtggcgcaacgtcggcaaccctcaccatccagacgaccgacgatacggacgtcgaagctgcggagaccgttgtggtcaccctcggcgcgggtacgggctacacgctgggcacgaacaaggttggcaccgctaccatcaccgacaacgatgtcgctcctgcaccaccgacacaaccgttgcgcacagtggtgcagaacaacgtcatccagaacgccaaggagactcggtcgaagacggggtatgcgacgcgttggccgtacatcattggttctggtgcagtcaaggaactggtcatttcgttcaataactggatcctgctctccaacaacacgatggcgaacaatggttctgctttgagcatcgtgaaggtaagtgtcgagtataatggtgtcgtggtcccggtcaccttcggcggttcgcgcacagccacgttggcggatggtgcgagcgacttccagagtgatgccatccaagcaagtgcattcggtgcaatcacctcactgccggtgggtgcaattatctatgtgaagacggtcttgttgctaccgtcgaccactgcgaccgttccgtcgaacgcgaagaacgcagcacaagcaggtgcggcagttcgttggtatgacccggccgtcaccaccctcagcgatgcggatgtcgcgggtcagttcactgccaccggtaccgctcctgaaactcgcacgggcggcatgtccccgctggtgcttggtcgctatgtatccggtgatccgaacacctacatcttcatcggggactcgatcacacagggtacgggtgacggcagtggcagcggtcggatcggcggtctcggttgggcggcacgtgcactggcagatgcagacggtaccagcaacccgaagtcgttcatcaatttcgcggttcatggttctgcatccaccgcagcgactgctgacgaccggttgtacaacttctacaagtatgcgacacgtgcgaccttgttctacggaacgaacgatctgggtcagaacggcgctggtgccagcttgtctgtcatgcagggtcgtttaaccacaattgcgcagaatctgaagagcaaggccggttcgagcatcacaaagatccttgcaggtcacttgctgccccgtgcgacttcgaccgacgcatgggcgactctggagaaccagaccccgacgggcgcaggttgggatgcgggcggtgtggttccgcagctgaacgattggctcacgtcgcaggtcggtatattgttcgacggttacgtgcacttctccagtgtgcggcatcccagcaacgacttccgctgggtcaccaacggaaccgccaattacgcagctaccgatgaaacgcatccgtcgactggcggtcacacgctgatggcgaacgatgcccgcaccgccctagctaacatggggtaatgagtgttgcggaccttcgggtccgcaacgtatgctaagccaccgattcaaggaattacatcatgggcaccaagaccgacaagatcaagtccgcgttggaaaaactggactacaagaacgacaaccattggacttccgatggtgcagcacgcgtcgacaccgtcaagctgctcgcaggcgacccgtcgatcacccgtgaagatatcacggaagcctctccggacttcaaccgcgagtcgcatgcggaaacccagaccgccggcgtacccgacaagggcggagcagcgaccgccgaaggcggggaaattaccaacccgaacaaccagaccggcaccactgcgcaggagaccgcccagaaccagcaggagcactccatcgacccgggcaatgtggtcaaggctccgttggctcccgccggtactgttgcaggcgagcagttcccgctcaaggccaacgacccgaccccgccggaaccgcagacgcagaacgcgtccggtcttacttcggatggtccgctgaccgcgaacgacgaaaccccggtcacactcaacctcaatctgggcggcgataccgaagatgaagggctgagtgatgacgagctcgcctccctcgagcgcgatgccgacgcaaccctgcgcgatgcggaagcccatttccagcgggctcaggaccagctccacgaagcccgtcggcagcgcgattatctgaccgatcaacgtaccttgttgggccgtagcacggaaaagaaccccacgatgcagtatctggagcgccagaaagaagaactggagcagcgtgcgcagttgcgtcgtcaggtatcggaatcgggtgtggatctgtcttcgctgcgccagcagatgtccgcatcgcccatcgaccaggcactgtctggccgtagccgcaagacgcgcggttaagggctggccatgaaccccgcgtcctatctgcagacacgttcccgcaggcagcgtcaagactacagcgcattcgattcgctgatgaagacgccgtcgaccggaccggtcgttatgcctgccaatgcaaccgttctctttatcgcaaggggagccatcgctaacggtgcgcagttgatggcaatcaccggaggtcagtccctgactgcctccggtgcgatgtctgcaggtggtacgcggcgtttcggcgtgatcgagaaaggtaagacggtcacgctcggaacgaacgtcgatatgtacatcgtgggcccgttcgggaagaattacaaagtcggagaagggtgatggctttcattcctgaggacggtacgggattaccggaagcgaatgcctacatcgatgtggcattcgctgattcgtatttcgaggatcgtggaaatgcatcttgggtcgtcaaagaccttgcggtgcgcgaagccgcgatcattcaagcaaccgattatatcaatgcccgctgggggaatcgtttccgcggggttcgtctcaaggatgatcaatcgcttcctttaccgacggatgcgtataatgggatcccgatcaatctcaagaaggctacagcggaatatgcaatccgcgccacgattggaccgttggcgcctgacctcgaaacggatgcatcgggttatcaagtttctcaatatcgtgaaaaagtaggtccgctggaagaaacaaagaccttcgcgacgggtgcgaccgcgaaggtctcgtcctggaaggtatacccggtgcctgacgcacttatgggcacactgctgcgtgcgtcagtggggcgggtgtaccgtgactgaccatgccaagttcgtcgcgctcgcacaaaggctcattgcaaagcatggacgggatgttggcttccagaagatcgggtcgaacaccccgaaacctgatgagccctggtatcgcgataatagcacccctgtggtcatcgctacgcagaaggcagtgtttcttcctgcttctggcgatcagctgggtatggagttcatatcagaagacctgttgctgcgttgcaatcaagtctgcatggttgcagcacagcctggtatcgagtttaaagacacgaatcatgtcatcgatggtggtgttgcattcaaggccgcttgggtgcagatgctttttcctggtgatactatcatcctatacgcaatggggttgaaccggtgagcctggaactcgtcgaagctaaaagtatcattcttcgtccattcgcttccgtctggacgtaccctgttgtttatggtgacactgtgggcgaaccacccactagcgaaaccctgtgggcccgtgttacactgcggcatgcggacgggggtcaatcaaccctaagcggaccagctaacggacaatgtcgttacgagatggtcggaaccttgtgggtcagcgtgttctcacccgtgggtgatggggaccatgccagcctgctagcgtgccaggaaatcctcaacgcgtaccgctctgccagaaaccaaggcgtttccttcagccgtgctagactgaacgaagtcggtgcgaatggcggattcgagcaaaacaatgtcctcgttgacttcgtatacgaccaatcaaggtgacccaaatggttgacaactgcccccgcgcaactcgcgattcgaacgacactggcctgcgcggtgcacgcgaggaatgcctgaagcaacttccggcaaccccggtatggcgcccgctggagcccaacagcttcggcgagttcggcgctcagctgagcaccacccaacgtgacgtgatcagcccgacgcgccagcgtcaaaaggcaatggtgaccgggctggatgcttccgcagcattccagacggatctgttgcaggacaacaacatcgaatacatcgaagccgcgctgtacgcagcggctcgaccgaacgcggccaacatcgattccgctggtatcgttatcccggttactgcggtggacgatacgaccggttatgcactgccgaatgcaacagcggcgctgttcaaggccaacgacattgtcgttgcgggcggattcggtactccggccaacaacggtgtcaaggtgctgggtgcaggtactgcgggcaacgtgctgacgacaggtctcgtggacgaggcagcacctccggtgtccgccactctgcgccgagtcggcttccagttcccagcagcagcactgcagatcgcagtgagcggcgatcttgtgtctctcaccagcgcgaccaccaacctcacgaccatcggcgttgtgccgggtcagtggatttacgtgggcggggacgacgtcaccaaccgcttcgatgtgcagtacggtttcgcgcgcgtgaagtcgatcagcgcaaccgtcatggcgttggacaaagtcacctgggcaaaccctgtcgcagcaacaggcacgggcaagtcgattcgcgtctataccggcattgtggtcaaaaacgaatcggaccgctcgctcattaagcggttcccgtatcagttcgagcgcactctgggagaagacgcggatggcaccatgtccgagtacgtcatcggcgcgctgctgaacggtgcaactttcaccctcgggaccgagagcaaggtcaccgctgattggacctttgtcggttgcgatggtgagccgcgcagcggtgccgaggggctgaagcccggtacgcgccccgctctggtgaccggcaagagcgcattcaacacctcgagtgatatcaagcgcatcgcgatttcggtcctcgatgcaaccacatcgcgtccggttccgctgttcgcttacgcaaccgatatgaccatcacgttcggaaacaaccagagtggtgccaaggcgctgggcgttcttggtaacgcggacatcacgaccggtatgctggacatcggcggtgatatcactggttacttccaggacatgcgtgctgcgaaagcagttcgcaataacgaagacgtgtccatcgacctgatcttggtcaaggacaacgcgggtctcgcattcgacattccgttgaccacacttggtaacggttccgcgagtgtgacgcccaatgagccgatcaccttgccgctggatatgtccggtgcggagagcgagttcggccataccttgctgtatgtcaatttcccgtacctgcccaccatcgcgcagaccaccaagctggtctaagtgaccctggagatccaatgaaaaacatctattcgctattcgctgacaagaagaagtcgctcgaaggtgtaccgctgattctgcacaaggacgaagagagcggtcgtgtcgtcaagatccttgtcgcgtacagcggtggtgcaaaccgacaccgcttcctgtcggcggtggaagaagtcatgcgccccttacgcgaagcggcagcaggccagccgatcgaaccggtggcgatgtatctcgccaaccaggaaatcgttgctcgctcgctcgtcatgggttgggagaatgtcctggaccgtgatggcaacgagatgcccttcacggtcgagaacgctgtgcagcttctgcaggatattccggacctttgtgagcgcatcgagcatatcgccgacaacgccgacaactacatgtcatcggtggaatccgacgcaaaaaactaatcagcgttcttacattcagtctgacccacggtaagaacgtccaacggttacgggagattgcggagaggcagggaatgcctctcccggatatcgttctgaacgaacccaagctgcaacccggtctaggcatctactggaaagcgttcaccgacctcagtgatagccgtacgatggggtaccagatgggttatatcccccggtcggagatgtacgcctacgcacaggtcaatggattgtcacaggatcaggcgattcggttagcggacatcgttagcaggctggacaacgcatatgtcgcctggcatatgaagcgggatgaagaccgtcgcaaggcggaagcctcgaaatcgaagcggagataacatggacctgcgggcgttcgccaacaagatgcacaagcgcgaagcggacctcaggaagaatgtcgacgctgtgaagcgccaagtcgctatctccgcggcaacaacagtgatatcagaaactccagtggacaccgctaagtcggtgtccaactggcgtatctatttcgggaacgaagcgggcggtgtggtcacccctcccctgatcccaggtagcaagggcagcaccagacaagagaacgtccggatggcgattcaaagggccattgcggatattcaagctggtgacgcgtcgaaagatatccgcatcggcaattcagtcgaatacattctggacctcaaccgcggaagctcaacacaggcgcctgcggggttcgtcgaagctgcgggcttggtagcccgcagagcgctcaagaacgccaaagtaatcaaggtgtaatgtgtccgacttaattgacatcgtagttaaggatagaggcacagaccgcactgccgcgaacctgggtaagatcggggacgctgcgcttgcagccatgggcaaagttgacgcgctcaacgcttcgttgggcagcaacaagaccgcatcgattatcagcgcccaggcacgcctgcaaaaggcgatgaacgatcaggcgaaggtggctgctcaagtcgcactcgtgaactccagggctgcggtcgccaccgcgcagctgaatcgcgctactgcccaggcagctacggcccagacgcagcttgccgccgcgcaggcgaaggctgctgcaagctcgcaagctagttcccgcagcaccaccgctgcaaacaacgcagcagcggcagcacaggcccgcgcaacagcggccaacaacgctgccggtaccgcagccgcgggggctgctgcgggcaccgcacggtacaccaaaagcgcgaaggagctagcgttcgctactcgaggtctacccgctcagttcaccgatatcgctgtctccttgcaaggcgggcagaatccattgacagtgctgctgcaacaaggtggccagctgaaggatatgtttggtggtgtcggacaggcatcgaaagcgatgttgggttatatccgtgggctggtcacaccgctcagcctagctgtcgttggtgtggggcttttgaccgctgctctgttgagcgcggaaagccagatgagccgtctgaacattgcggttatccagagtggaaattacctggggcgaagcggacaagacctttctaactacgccgacaaactcgatgccctccaaggggtgactcgcgggtctgctgtggatgcaatcgccgcagtagtctcgtccggcgcggcaagccagaagaccttccagcagatgactactgctacggcggcttgggcagctgcgacaggcgaggaagtagacaagatcgttgacaagttccaaatgattgcacgcgatcctgtcaacgcattgctgaagctcaacgaggcggaacacttcctcacccaagcgcagctcgaccgtgtggctgcgctagttgaagaaggtaaggcacaggatgcagcggacctcgcgaaccgcatctatgcttcaaacctgacttcgcgtgcgacagagattgggcagaacctcaccaatatcaaacagtggtggaacgacatcaaggacgcaacgtccgctgcgttcacctggctggcaaagtacgccgacatcggggttggcaccatcggtaggcagatcgacgcagcgacccagctggcagggaagctgtggtcaatcggaaacgatactgctacggaaggcaacccgattgcccgcatcaaaatgctggccgctgcgaccgctgaatatgcaaaggcgaacacgactgcggttgctgctgaaaagaaagcatcggaagaccgcaagcgtgctgcggccaaccagaaaggcgaccccaacgtcagcgtcaatagcgcagatgctaagaagcgtcttgaggagcgcaagaaggcgctgaccgaatggaatagcgtcacagaccaaaatctgtccaagaaggatgcacagcttaaagaggaagctcgtctgcagaagctgggcgagacgctaggttacagccaggagaagatcgacaagcagatcgctgaatcgcgtcggaagtacacggaagtcaatactaagaaagtcaagaagaataccgagggggaatcccttctcgaatccgcgcagcggcagatcactgctaacaaagagcagttggcaactaacgaaaagttgaccacatcgcagcggcagatcatcgcgatcgagcaggcgctgggagatagcaagaacaagatgacttcgacggtccgtgctggtctcgaggctgcgaaggctgagttggaaacgacgggtaagcaggtcaaggagcaagaagctcacgccaaggcgctggagaacctaaaccgcatccagaatgaaatggagcaacgccgacagaacatcactgcggagaacgagaacgaaatctacggtatgacgcattccgatgctgagactgcgcgccgtcagaagcagctggatatctacaagtggtacgagggtgagctcaagtccctgcgcgacaaggggatcgctgagacgtccgacgactacaagatgcagcagacgcagctcaaggctcagctggattgggagttggagcagacgcgtctcaccgaagcgcgaaaagctgaaatccgtggtagctaccaggctggcttcgagaaggcctggaccaactacatggaaggcgtaagcaacatctccgaagctagcgaaagcctgctcaccaatgcgttgagcagcatggagagcgcgctcaccagcttcgtcagcacaggtaaggcaagtttctcgtctttgaccgaatctatcatcgctgatatttcccgtatggcgctgcgtgctgctgctagtggcttgttcggtggggcttcgggcggtggtagcaacagctggatcggcacagcgatcaatggtgtgatggggatgtttggtggtggttccaatgtcggtgcgcagtcgaccgcagcaatgatgggcacgaacagccagctgacgaatagcatcgtcactgagcctacgatgttcaagtttgccaagggtggtacgtttggcgtaatgggtgaagcaggcgcggaagcggtgatgccgctcgcgaaagacagctccggttcgctcggtgtcaaagtgcacgattcatcgggtggcggtggggctagcggaatgcctgtggtcaatgttaacgttatcggtgcagacgacgctaaggttgaaacttcaaccgatgcgaagggtaacatgaacatcgacgtcctccttgggcaagtgaagaaatctatcgcaggcgatattgccagcggtaacggatcaattcctaaggcgatcgaatcacggttccaggtcaggtcacgcaactaatggcaactttaccagactacgtcacattcctgttcgacggttacggcgaagggttcgacccagctgtcaatcgcaccgagatggaacgaggacgtcctaagcaagcgaggcgagcttcgcaggtactcatgaaggtgcctgcgcagttctattttacatcttatgccgacgcactggcattcgagatttggtactttgacgtcatcaaacggactggccaattttctttcacgcatcccgcgactggccaagtgatccacggcgccaacttcattgggggtgacatcggccaattggtccctgcttccgctgcatggtttgaattcatgcgcactgtccaaatcgagtacctacgcggatgagcacgttcaagcaacgaaagcaactcatttctgattcatccacgactctagtgttgcttgaatttcgtgactcagcgactggtactatctcacgcctagtaaacgacgtcgtggattggacgatcgctggggtcacctatatcggtctaccgttcaatttcaaacccccttccgatatcacaggtgaaacctcaaagggaagcatatcgatcgataacgtcggtcgtggtatcagcgagctcatggaaacactgaacccgctgtcccgcatgtatgcaaaagtcatcgtgaccgattcagaggatccgacatacgtcgaagtcgattatatccttcctatgtcgtccgtcacgattaatggtgtagtagctaccgcttcggtaggcgtggattttttgatgaatcaatccgcagtcaagaaacggtttgacccggtcactactcctggcgtgttctgatgcgtgcgcgtgatcttgatcggtattgccagatcccatattcatcggatggctttgattgcgcggatcttgttatccttgtgcagcgcgaactgtttgatcgcgaggtgcagttaccacaacagcgtccgcgcggtaaagacggtcagcgagtgcttgcgagccatacagaagtgtacggctccaagacggaccgtatcgaagatggcctcctggttctgatgcgatcgatgggtgtaagagacgcctggcacgtcggtgtgctttttgtccttgacggtgagccgcacgtgctgcatactacccggagaaacgggttcagccaagtcaacgcgttccgcgagctgcccatgcacggcatcagactagaaggcgtctacgaatggaaagctcagtcggccggctgatcactactccgcatcctgtaactctcgaagggcaaaacgaacgccatgcggaactgatcccgggcgaaacccttcgacagtttgttagtcgccacgtctctgatttcgagacccgtccgtaccgtgtcgcggttagcgggctggtcattccggttgagctgtgggacgaactgcgtccccaagacggagctatcatcgagtgccgaagcactgtgcgagacagcagtgtgtggcgcttgatcgctttcgcggtcctcacctacttcacgatgggtgccggcggtattgcaggcggttcgttcctcggccttacgggtgtggcgggttacgccgcggccaccgccgcattcatcgctggttcggtcatcatcaacaaggttcttccgccgatcaaaccgcccggcggtgctgcgacgcaaaagaacgtttatggtcttggcgatcaacgaaatgccgtccgacagtatgagcagccaggtctgctctttggtgaagtatacattgccccagacattgcgtccagtgcctacccgtattacctgggcgaggagcagtatctgggcatggtgctgaccccaggcttcaattgcggaaaggtgtccgacctgcggctgggcgacaacctgatcaccaactaccgggaagtgtcggtttattacaacggcttcccggacatgcccaccaacgaaatcccgttgtggtcaaactccgaagtcactccgggtggcaccctcgagccgaatatctctgtcgtgcgcacaagcggtccggatgcgatctctttgcaagtcgatatcgaatacatgttgttcgacacgaccacgaagggtggggaaaaagagaatcaggaaagtatcaacattgtcttccgtcctgcgggtacgaacgcagggtggacacctttcttccccaatggagtaacgaccgaagtcaggagccgcacccaggatcagaagcgcgcttcctaccgccgcgacgttcctcgtgggcaatacgaagtcagcgtgaccaggctgggcagggacaccgaaggtaagggcgcccgtgcgcagttcggtttcagcaacctagtaagtcgacaatacgataacgcgacctatgcaggctttggtcgggttggtttcagtattcgcgcctcggggcagatcagcaatacggtcgatgagatccgcatgctggccactgcgaaatccatgccctattggaatggtacacagtggaccatggcgaccaatcggtcgaacggtctttccaatccgggcgcccagacactgctctatgcgcgaggcatctacgacaacgaaggaacgctagttgcggggctcggactgagcgacgatgagatcgacatcgagtcgctgaagtcctttatggtgcactgtgaacgccgcggttacaagtatgacgcgtgggtgatcgattcccgcagtcacaaggacatgctgacagctatcacccttgcgggtatgggtgaatggacatgggcgagcggtaagttcggcgtcgcttggtctgacaaggaccagggcctcagcgctgtggtcaatatgaccgtgatccgtaataagactttccaagtcgattacaccttgctcaacgccgcagatggtttgatctacagctatttcgatcgttctgattggaaggtcaaacagatccgaattcctgcaccaggggtgcagacgatgctcaatccggtgagcgtgacgggtgagggcatcacggacattaaccacgcactcacgatggcccgataccatatgggtcagaatttgtacatgcagaaggaagttgcttacggtgccgacatcgagcacatgagctaccgccgtctgtcgttggtgtcgatgcagcacgatctcacgcagtggggcttcggtgggaggctgatgggtttccgccgagagggtatctacccggtcgtcacggtcgattttgatatccccgaaggcttcgacgataacaattggattggtatccgcgtcccgggcgaagacgtctatcgagttttcccggtattgagctataacgaccagcgtgaagttttcctcggggaagcatggccctccgacgctgaggcgcccgcggagttcctcacgaacgaagataacagcccggagaactacctctggtgttttgacatcaagcagacacccggtgtgcgcatgcgtatcaccggtatgtcaccgggggataacttcgagactgcggatgtcacgtgcgtacctgaaaccgatgagttctggaacttcgtggagacgggtgaatacgtcccgcccggtagccagagcctccttccgggtcgtccggtcgcgagcaatctgcgagtcagcgaacaggagatcgtgcagggtgatacggtctatcacgagttcactgcgctcttcgacgtcaccggatacatggtgaatgcgttggtgtattgcaaccctgtcgggcagacccccgtgcttgttgcgaacacggttgagcgcagggctacgtggcgtgtgcaggagcccggtcagtacaccatcactgtgcagccttacggtgaaggcggacgcctcggtgtaccgattcagatcatttatgacaccgagaagattggtgttccgccgaccaactacgacatctttaccgtcaccgaaaagggtgatggtatgcgacaattcgatttcgactattcaacggaagaaattcaacccgcaaatctgatgggcgcatacatccgtatgcagtccggaaccctcgtggacccgaattgggacactatgtccccattattcatgacgggtttcttccctgcgtctttccagacttctatccctgatgctgggcaatggacgttcgcgatacgtgcagtcacgaccggtggtattctatctgacaccaagaaagtcatccacgtcaccctcactgaaagcctgggtgaaaaactcacccaatcgaacaacgatatcacgaaggagatccaagaccgctttaacgccgacctggcggaagcgcaagcgcgtgcggatgctatcaaccaagtcatcaatctgcaacagcaggaagtgcagaatcggatcgacgctattgcgcttgagcgcgacgcacgcatcgctgctattcaagataacgccgatcagatccttaatgagaaacttgaacgcgaagcggcgatcgagaccctaacgggtgcgtaccaatctgcggatgaatcccttgcgttccagatcagccagatcagcgcgggcaccggaacgcagttcgatagcaagaagatctggtatttcgacagcaacaatgaagggtggaccggtactgctgcggacggttatttggacccaggcgcagcgatcgcacagagccccacaggccttgcgatcacagggtccgagtaccgctacgttaaagcacgcgtaaagcgtgtgggcacgcccacgtggcttggtcgggtggcctgggtgctaggcacgggtgcgacgggtggtaaagacgtccccgaaccaaattgggaccccaatggaatcgcaacattcgatgtggacgatcttgcgtggactgccggtgtggtcaaccgcatctctgtccaattgggaagcagcgtcaccgcttcgaattattatctcattgactggatcgcgattggtcgccccaccccaggcgcatcggttgctctggtacaagaggaacgagaagcgcgcatcgcaggagatagcgctgaagcaacgtcgaggcaacaactcgcagtgcagatgcgaggaagttacacgggcactgatctggcgcaagtcgcatcgggcctcttgttcgcggaacgcactgctcgcataaatggtgattccgtcatcgttgagcaggtgacagcgctaagcgcacgagttgatgataaagctgaagccagtatcgttgagacattgaccacaaaggtcaatgttatcgatggggagctcactgctgtttccgaggctgtattctcgctcgacgcgcagctcacgggcgattttagcggtgacgacgatgtgtactcaggagacacggaagtctattctggggcgatcactgtctatagtgtgatcgcagatggagatcgagcactatctgaacagatcaattcggtaacgactgcgtttggggatttccagaccactgtaacgacacagattcaagccatctcgtcgaacgttgaatctttcggtcagcagttggtcacggtcaattccgaactcgcagataaggccagcgctgaatctgttcaattgctgacgacgaaagttacagagaacacaaacggcatcacggcgattggccaacagctggtgcaggtcaacgcagatattgcaggcaaagctaacgcgtcgattgttcaaggtctacagtcgaccgtcagcgatatcgacggtcgagtcaccgctaatagcaacgcactcacgcaagtgagtgcaagcgttgcaggcaaagctgaagctagcgtcgtacagcagttgagcgctacagtaagcacccaagggggcgcgatctcgtctatcaatgcccaatatttcttagccgtaactgcgcaaggattagtaggcggtatgaagatcggaaataatgggaacaccgtcgcattccaagtccttgcagatagctttgtaatcgttgcgccaactggcggacgccgatcagaatattcgaacggcaattggcgtgcctacgacgagaacggcaccatgcgcacccgaaatggtgtgtggtaatcaactaggatatcaagatggcatttaccgcgatcaatactacgcaggataaccccaacggcaagaagggtgtcccgaataaaaccgcctgggaaacgacgaacgccaatttcgttgacgcgcaagctcaattggatacaaaagcagcagacgaggatctagcttctgagcaagcggcacgtatcgccgccgacaacgcgcttgcgactgcgatgaatcaggcgttagcttctaaagccgatgctagcgcactgtcgacgctaaatggagtcgttaccagtcaaggcacggcaatcggccagcgcgcattgcaaaccgatcttgctgcggaagtcaccgcacgcaccaacgccgacaccgcaatcaacaacattcttggcacctacaagagtgccgccaaggcggatattctaggtgtggtcgcaatgtcaggcggcgtaccatcgggggctataacggaaacgggttcaaacgccaatggtaactactataaatttgccaacggctttatggtctgcaccaggacagtgggtgttatcactatcgctcagggtgctacctataattcccctacctttgcttttgccgctaacttctcctcttccccggtttgcgcactacagattagttgcagctttccatttctggtggatggcaactacgaggctggtataaccgccagcgcctgccgcttctctattaacacccgtcatagcgggacaattaatgacctatatgccggcatcatagcagtcggacggtggaactaatgaagatcaaattttctccgcagcgatgtgattctgttttggtcgtcgaagtgcagggtgatgtcttacacttgaacggtgaagcgttcgatttttcaccgttgcaagaggggcaattgctgccacattccgcaattgtttctgattttatttgcggcgacatcgagcgaatcgacggccacattgtggtcacgctgattcttccgcatggggccgatgccaccgaggcgcggcgtttcccggaagacatgattatcaattcgaacggcaaggtggatctacccgaatgaatatcgactactcccaactgaagaccgccgagacgctgcaacaagaagcgtttgcgaaactgatcgcagggaccgatcgggccatagaagaatggctgaacggtttcgtccagcagaggaactacaaatcgatcgagtcctgcgtgagttatgtagatgacgaagacgaatacttcgccgccgaaggccttgcagcaaaacgttggcgcagtgctgtataccgcgaggctcgatcaattctcttgaacccgccgcccgaaatcacaccggaaaatatcttgcagcaccttccgcaaccggaagcatttgattggcctgtgagaatggtccaaccgcttgacaaagacacggctgaaacgtaatgccagcagggttcgaagcgtacgacgcacaagcccgtctagtgattggtctcacctcgcgactcagcagaatcgtaggctacgcgtcggtcaacgcgggccaagcaggccaagtaaatgtcaatcctgcgttaggcgaaccttggttcttctttgtcaataccggacgttttgctcgcgtgaccacaaacgcaagcaacggggttatttcctgggacaacagtgggcttgataatatggtcatgatgtacggagtccgataatgccagcagggttcgaagcctacgcgcaggacggatccaatttcctgcaaatcgacaacacctacaagaatctattcctgcgccataaggccgggttgactagctcccccgttggcggcgcgaatcaacccatctccactgtcgcctgggatatctactgctacggcgttccggtggtagtggtgtcggaaaccttccctatcgcatacgatatcagcccgcagtcggggcagggatttgggcaaccgggggtctaccgcgtgttcttcacccacgcaggtagctcagcaggtttcactgcctgggcgttcgaccagctagtgcaaagcgacgcgtctaattttggtcaccaagcatggaacccagcgggtgaacttattttcgacgctgtaaaactcccgatgcgcgtcgtaggtctattcactggaaaccccgctactggcttctacatggacctgcccgcctcttacgggcgtgtgggggttgcatgtacgtcggggttcttcacccagaacgtcggagctccgcaattgggatacttccgatatggtgctgtggtcaacaataacaacactcgcccggctgtgggaaactttctagcggggttacagaactctgtgaacccctatgggggcgatcgcccgtccatgggcatcgctgtcgaccttacgaattactgacgacgctcggcgatcacagcagcaaggcatgcggtgtacaccgattcgctgtagttctgcggccatcccttgctgtaatacaccgtatcgaccatcatctgataggtctgacgggtgtacggcccgaccttctcctgcgataccagattcttgacgcggttgtatggacgaccctcgtcgtgcgaaaccttgatgaaatctgcgacgcgtgccatgtcctggcaggtgacgttcgagctggtggaggcgctagctgcacccgaggcggccagcagtgtggtaacgagcaacagagcgatcttgttcattttgcatctcccggtgggtgtgttggtgtagttcctaatatagacgcatctgtaaaagacgcaagcactttttacaacgaaaaacggaacggttcatagaccgttccgttttgattatatctgttgcggcatcgggggttcagaccccggaggtggttgcggggtgagcaccggcatatccggtgtctcgactgtgaagtatttgtaggcgaggaacaatccgatctcacctcccacgttttcaggccatttgatctgcttgaggcctgggatcacctgatcgttgatgataagatcgcatgtgccattcgggttgatcttgaccacaatggtcggaagttttgtgctcatcctgttatccttaggtgctttgtttcgagaacgcgatagaccggaactccacaatagaagcaagtgacggcgtcagctttgacgtttcgtccccaatacctcagcgctgtgtattcctcatggccgaggtaaataccttcgatagttttgcccaggttctctttcaaaaacctttcacacgacatgtcgatcagtttgatagtccgatggacctgagcattattcatgagcccctcgcttgcatatgggattcgatttcttccgcaaggtcgacgatgcgtttgcggaggtgcgctgctagtaattcgttcgcacgacgcaactcatacgagtgggtcatggcgagctgtgcatacatctcgatcaagtcagccggcatcggtctgtctcactaagtcggtgaagaattcgtaggcttcgcggtgtgcttgcctgtcttgctcgctgcatgtcgcacagttcgcgagcgcattatagcgtgtttgcatggcaagtgcagcgcggtggaagtgtagacgcgctttgccaatgctggggacttgcaaggtaaggggttgcgtacccattgacttaccctgcgggccccgctttcgggggtacaccgctatgcaaccccagcgccgccactaccctacggctcagtgtgcgcggggcctgcagcatgcgtttcctacgctgcttcactacccattgatccgctttttcgtcgagtgggtttccgatcattggggtcgggacaaaagaccatttcccgttcaccatcagcagatgcggtttcttggtctgctcctgcaacatgtaaaccctgtagaggatttcccgatctttttcagtgagcatcagaatttctccagcttgttgcgatcggtatccatcggtcgcgagatcgagaaatttgcagctgcgcgagaacctgcgttcatggttccttcgtaaccgcgcatcatattcgctttggttttagtcagctccccatgcttcgcagtgatggcgagttctgtacgttcgcgctcgttctcgccccaaccaatctcgaccagcttatcttcgatctcttgcaaccagctgacttggaaactggatttcgctgctcggacacctttccactcgggtgcgagcttgagatgttctcgccatgcagcttccatagcgcggtacaccacctgatgcgcatacgcagcagtcgccaggcggtgcttcggaccaaaatactggatggtgaagctagcgtccgaaatacgaacggtccggcgaatcactgcgcgcaccgagaaggaacgcgtgataatgttcacgagaacggtgagaaccatcggaatcttcttgcccgcttggatagggcagtcaacatcctcggagccgatggcgctcatctcgatatcattttcatcgagcccgtgctgctgcatcaacttctgcgcatggcgcagtgcggtagcagcttcgttggcgttcgcacttttgctgagcgcgaggcacttcttgatcttatcgatgatgcgttctttgtcagacattgtcaaccctcaccagcaggaccgtgttgtctgctgcgtcatgttcgaaatacgccgccaggccggtgcagtcgcatccgtcggaatgcagaacggcatccggtggaaatgtcttgagctgcgcgatcgcttgagcaaccgtgaacggattctcccgcatcaccttgatacgtttttcgcgttctttcttgttctcgaggatcttttcatattcgcgcttttgttgctcacggatttcggcgttacgcgccgccatctcgttgagggatggaaaagaataatcggcgccactcggaatctcaatcttgcgaaccatgtcttgtctccttgcgttgtgcacactatacacgacgcaacaggcgttgcaatgatttcttaggcgtaggcaagactcttcagcatcttctcggtgtcagcgatgtaacgttcgtagtcgatgtcgatagggaaagagcttggcaagtccatgcaagggcgagcaccatcggacttgggaaccttcttaccgttcttcgcgtacaccatttcatgcggaacacccgtcgcgtaatagaagcgcacagttttcccgaggtattcgttctcggtggggaactgaccgtcagtcatcggatccccatcgcgatgccatatcttcactgccccacccttcacagcgcggatgtgcatgaacttttcggcttgcgtgcaattcttgatcgtaatatcgatcggcgtacctgtggtcaacaactgctcgatcgcttccacgcagacgatacccgtcgggtttttatgcatccactccgacttgtcctcgctctgcccccacgggttggcgaaagcgcccttggtcttgcaccctgctggttcgtttaaccacaccttattcgccttatcgaacttcttcttgacagcgatgtagttgttcacgtcgcgggatagcagcttcaggtattgcgtttcctccaactcgaaaccggtctgcgcctgccatgccttggtgatatcgtacatcgcatccttcatacccttcgggcacttcaagacgataccgtcagtattagcgctggcaacagtgatacccgcccattccatccactcgatcaacatcagcaacgataactgtccagtcatggtcacttggatcaaaaggtctggtgagtacagcttggaatacttgctgccgagtttgccgtaagacccgttcacaagaatcttcaagatctgcgcgagcagtttgttgccgctgcgctttgcttcgacgcggtcgcaaacgatgcggtcgtagatccgaaggaatgcaggccccaggtgtttcgggtagagcccctggttcaggatgatacgggggtagaacgatgttacgtcgaaatcgtgaagagtgtactcctcgcattcgactagggcttgcttcttttcattgctgtgcaacccaccgatgccgatggtgtattttcgtccagcgacatggatatcaagatcttcgatggtaggtggggtctcgatcgaaccatgatccgcgacaataaacggcgctgcacataccgttgcgaacgctttagctagttcggggtgcgtgaagcgcatgtacggttgcgggtggtaccgatacacggtcccaggtgcaatttcaggcgtttcaacacgtgccttgatctgttgctcgacttccttcgcgaacactgcttctgcgatttgggcgtcggacttgctacgcatgtcgatgccgtattgctcggtcatttcgatgcggactgagatatgctcgcgcaacgtttcacgaagcaacaacgtgttcgcaaggtcgttgcacatgtaatatcgggtgatcgtgatctgatcgtcgctcagctcgatatccgggtcgaacggcaaatcctgcatacgcttagcgtggcaccgcccagcgtatgacttcagcgaaccgcgcagaggggctacctccaagagatcaatgtggtcaacctccttcaggctcactttcttggtgcggaagtatttcaggacatccttgtgatacatttcctccttaatcatcatatcggatgcttgtttcagctgctgcgtagtgcagcccttctcgacaagcgaagcgatcgacaaatcgtatttgaatgagttgaacccgatgacagtaaacatccgcagcatccagcggaatttatccatctcgaattctttctcgaacccagcaaacatctccatcacgacgatcttacctgtcgtaacgcttttgaatcccgccccgaaataattgcggtacacttcgaagtcgaatatgaattcttccttcggggtgatgtacttttcccgcgacatctcgtagagttcttcgtccgagatgaattcaataccccgcatttcgcgagcttcttccaggtacggaagatagtcagatcgcaaccaatgcgggtctggaggtgttgccttcggcttgggcggtttcaactttttgacgacaggttcatcccgccagaacaaaccgagggcatctttccgcattacaggcgcatcccgataatcgctccgcggagcggtccatcactgaagaacgtgcacgggccagggtagcgcgtaaagtccgcagtcttggctacaccgtccaggagggagatcatttcgattgagtaaagggaatcgggtccttgccaatccaatccgtaatttgcaccttcttctgctgattggtgggttcgcaatccctctgcagaaagaaagacttgacccaatttgtttgcgaagggcttgatggcgtcgattccgtcaaatagaccttctgggattccggtcgggttcgactcaacgttaagaattgctccaaggtcaggccactctgttgagaataattgagttctgatccaacgcccatccgcgtaatagaatgtagcggagttttcggaaacggcagcatgagtcggggtctcgttgatgcggatcatttcctgcacggcagctcgcggaaggttgaccacatgtgggaagatgtcgcccagccagtattgtaccagacagacgttgttcgtcgcgaagatggattggtctttaagcagtacacctgtcgcccagggacgtgacgcatcgtttccgatgaacggccacaccgccttgagaccttcgagcatctctgcgccgcggaaatacacgggttcaccttcgggctgcacgaaagcagactcgccatcgacgcactcgatcagagctctgaacttaccgctcttgatactcagtttgcccgtaggggtcatactcaggctgatcgtctcgttgcagcgcgcgatcgcttgcaccatcgggatagctttggggtgacagtccaagtcacatgcgatcgggctgcacagcgagatggttccgttgtacgcgcgcaccgtgccgttcttgatcgcaaagtgcgtgatcgcgggaatgaattccttcttagcgactgcaccctgcacgaatttgagttccttcagcattcgaagggttccccggtacgcttgtcgatcaggacgactttgccggtgacgacttcacacagagctgcatccccttcctcgttcaacttgatcattccgtcttcgccgataacatacttgcggatgaatccagcttccgtatcgacgtaaaacacacgctcgtgcacaacgtcgtccacctggacttccgcattcgaacggatctcaagctgccgattattcatcctgtgcatgccatacgcatcgatgatcattaaaataactcctggactgggtttttaaagacgccatggttgacggcgttcaccattgtttcgatcacaccatacgcccacaggttatatgctgcacgcgattcatacaccgtcgcaagcctttccagcgtaaacccttgctcggcaagcatatcgagaacgtgctgctgctggattggcgtcagtgtggttacatgttgcccagcatcgtgtctgctaggggatttctcggatacgctcagcggtccgtatgcaggactcacaacactcccgaacgctgcgctttggatccaggacgaggagtcgcagctataccatggataccgttccatgatggggactgctgtgataccgaagccgtgcacctttactcgagcacgaccgctgccgtcggtgaggtagcggtcccacatgcgatccaaccagatcatcagctgcttcgttgagcttcccaccataccgccgagggtgatatactcatagttctggatataatactccaggtatttttcgtcttccccagcgtgaaagcatggaagcggccgcacaccccgtgcttccatttccagttggttacggtaagtctgcaatggatcaccgataccgtcaagcacagacgccattaacgcgccatcctcgacacgaatgatatccctattgcgttggatgtaatcgcagtagtctgatacctttaggtccacccctagcgtgtacgcggagaatgcaccggagtcgaggaatatctttgcgccatccgcacgcatttcatccacgaatttttgcttaccgacgtagtgccaggactcgagaatatgcggaagattttcgaccaatcgtttctcatgatcggtcagtttcgcataacggttctgccctggtttatagctgttcgtgtagacagctgccatgaagatatacatcagtcccgcaccacggtctcaacttcgataccctggatcttgagcatctccatcgccacaatccaatttctttgttcttcagcggtcatgcggtatcgtttagcgttgacggcatacaccttgacttcggacccgcgaagtccgcgcagcggatcagggaaacggctgaccacaacgagggtggcccggtttgggtgcatcttcaggcattcgtggcatgcatgcctggcatgttcataccgcgcggcaattacgatggctttcataaatcacctcagtaaaacggggcgctagtgcaccccgctagtatacacaacgcgcgtttacctcgcaagcgccatgaactcagctcttgtacggtcctcactgaggatcacaccccgcaacgcgctggtgacggtgtggtgtccctgctggcagataccgcgcgactccatgcacatgtggcgggccttgacgacgacacccacgccgagcggttgcaggtgctcttcgagcgcgtcagcgatctgcttcgtgaggcgttcctgcacttgcaagcgtcgcgcaaatgcgtcgacgacacgggacagcttggacagaccaacgactcgccctttgctggggatgtaggcgaccgtcgcagtaccaaaaatgtcggccatgtggtgctcacacttgctatagaacgggatgtccttgaccagcaccatctggtcgtacccttcgccgccgtcggtgaactgtgtcttcaggacttccccgatatccacgctgtacccgccaaaccaatgaagcatcgccttcgcaacgcgcttcggcgtatcccgcaaaccctcgcggagcgggatcatgccctgcccagaagctgcttcagggtcaatctcgagcaggatattctcgattgcggtagcgatactatttttgtgcgtcatatggaacctcgtagattgcgctgttggcaccgtgctcgcgcacttccaccttcagcagttgaacgcgattggtgtttgtcatcttcgaaactgatgcgtggatgaattttgcgagagcctcacatccgaccgcatcaagaatgcgaagctcgatcataccaaccgcagcaagagcctgcaacctgctaagatcggggtcatcgatagcggcgagcgtagtgtggtcaagcaaccactccaagaactctttgacttcaccgagccccccaaaatccaccacccaattacgtgcgtcgaggacttcagcgccccactcgaacgataccgcgagcgcgtatccgtgcaagagagcgcaatgggatgatgcgcgccactgtctgaagcagcagctcagaccgcgttcgtgtccgtaagtcttggttgatttatacatcgtcgttctcgtacctgatcacttcggggatattgttgatctggaatgcggtcttgcgcatgaaacacggtccgcacttgccgcagtgcacctcgccggcacggtagcagctccaggtcaagtccaatggtgccccaatactgttaccgagcgcaacgatttcatgcttcatcatattaccgacgggcatgatcacacgcacctgcttaccgtcacccaccgcgaaaggcaacaggtcgttgaagcggtcgatgaattcaggttcgttgtccgggtatgcaccagcttcttccaggttgttgcccagcacgatcacatcgtacccgttcgcctctgcatatgcagttgcaaccgaaagcatgatgaggttccgagcaggcacccattcgtgcgcaaattcggcacccacctcacccccagcgatcgcgctgtccgcgcgcagcagcggcgagtccttggggtcgtacacgggtagcgggaacagcttcagcggggcacctagccgcgcagcaacggcctgcacggcagtgatttcagggccctcggcacgcgaaccatactggaagttgatcagcccgatttccataccgatcaccttctgggcatacgtcgcagcgacgacactgtccagacccccgctgcacaccaccagagcgcgcttgttgctctgcggaagcagtggggtccgccccatgacgggcaagctaaagaagtcgagccctcgcgcttcgtagatcgagtattgctgcaacgcttcgggcacacccaggccttcagggaacacatcgcgcgaacttccgaagaacataccgatgctggtcgtcagtaaccacacggggcggtagttcattgcgatatgcagggagcgggagttcatgtgtgcgatgatcgcatagctgcctttcagcttgcggaccgcaccctcgaactcgaattcatccaggcctgaaagggtttccgcgatagcagcgctgtcgatgcgtgtcggaaccgcgctcacgccttcatacgctgcgcgtgcacgcaacgcatgatcgttggcgatagttccgttgtgcacgatcgcccaacccccggattcgtagggctgctggtcatcgctcgtcttgtgctggacgtactcggtcgtcggttcagcgcgcacgttcgcgataaacgatacatgccccattgacacaccttgcaggatcggttcgcggtacttctcgaaatccgccagcgaagtgaacttgcggggcgtccaatcattttcaccctcgccgctgtcgctcatgtaatgccaaccgatcccgtcccgaccgcgcatcgtactgcgttcgagaattccacgcaggattgattcagccaggatgtggtcagcctcactccgcagattcagtagtgcaccgatgatcgcacacatattattcagctccgatgattttgtgaacttgcaagcacaaccgaaacccatacttcatgcacgagttcacgactgcgtcgagattggccttatttttggcaacatctttttcatccaccggttgcaggtagatcgtcccgccccaccagatgggtggacggaaaagatgtttctttgacgggtgttccaaagcgcggatcggtaagccgtcactcatcagactttctgcggtcgcgacgtacttgaacgctttgacatatgggatcagatcttcgttgaccacatgtgtcttcgggctgcacacgatcgacaggttcttgtgccaggggagctcctggaaataagacccattggtctcgatctgcacgtggaagcccgcgttcaagagcacttttatcaatggccgcagattttgacgcatcggctcaccgccggtgatcacaaccagttgcccacccttcacgattgtgtgacccttctcgatcatccaatctgtgacgacatgctccatctcgcgaagcacgtgatcggggttcatacgcaggcgctgcgcagtgtattccgtgtcgcacatcgggcactggaggttgcatccggccaacctcacaaaaatagcggggcatcccgcatagggaccctcgccttggatggtataaaagatggaatgcacttcgacgctaccgtcatcgcggcggtcgaccctttcgggcttttggttgttgagcattttgtacctcggataagttgcaaaggcgcccgaagggcgcctttgcgggttgccgggttggcaggtattactcggccgacggagccaccggggccgcgggcacttcggcctgcggagcaccgacgcgacccgacacaccgaagaacttgcgccagcgggcgtattcggcgcggacgttgccttcgttcaagttctcggccttggccacttccagggattcggagatggacgccggcgaaccgttcttggcggagatgtcgtcgaagattttccacgcgcgaccgcacagggtgtccggcttcggtcggcggataccgttggattccggcatcttgctggattccttcgcggcgatcgcagcggccttggcctcttccttcgccttcagcttgtccgccttttcctgctccttggcagccttggcagcttcgcgcgcctcggccttttccttcgctgctgcggccttggcttctgccttggcggccttttcctgctccttctggagcttcttggcttcggcggcctgctgttcggcggccaactgctcgggggtcttctcggtcatgatactttctcctaacttgctgttgttgtgggattacgctggacaggactgcaccttactacggtcaaatgcgaaaaacaatgattatttgggcagccgggccttttgccaattgccgagttcgttactcgaagttgtcttcttcacgcccgaatcggtttcaagcgcggtcatgatatctttacgcagtttaagcacagtcgcgggctcggtgggctttcccgcggcctcccacattttgtcagcggccgcccagataatgtccttagctcccccgcgacgcgggccgctgggtgccccggtgctggccgcgcggggtgtcgctgctggcttagcactgctagggggtgcaacgtaagcaggggcgcatacaggcggccgcttcgcgatctcattctcggatgcactcttgaggatctgcagacccttcaattcaaaaatgttcgcttgcttgacgggttctttcatgcctttgacgtaaacataccgctcggaacgctgttcctgcaccttcgatgcgactaggtccagctcagaggcgtttacatcacgttcaggaatccgctcgacaaactctctcaatatattcttgagaggttccccgatcttggtggcggtctgccccgtcgtatttttatacagaatcatcatttcaaggtcggtgaaaccagccaggaaagtgtggtcatctgcagtcaagtaaatcgcgcgttgctgtgtgcactccacccatgcaagatttgcacacacccagaggtccgtatgcttgattggcaagaactgcaagtgttcgcggtcgatgacgatatgcatcagacacccggcacgtagtgttcgattttaccatcgggcgacacaaaacgcacatcgaccagacccggtgtctgtttgacccagatgcgtgcagatttacgcgtcttgaaaccgtcacgactcatttcgacagcgtcctttttatacagaacagtccacatttcaattgaccttcaggggtggtgtgtacgcagcatacggcattctaaacggaatacaatgattatttagaacgggatatcgtcatcgcaaaaatcccccagcagtgcccgcgaatccaacctctcgatttcaccaaggtcagggttgatctgcagcggatcgtaaggtctcgcgtaagggctgaccgcacggttcgcatccactgtcggtgcttcggttggagtctccagggtgttgaaggcagtaccgtcaaaacagtaagccataatttcaggatactgcttattcgtccagacccgcaactgcgttggcaccttgaacatggtgcagaactccagagcctcctttgtagtgctcatcatgttaccgtcaaggcgttctttcatccatgcgcgtgctttacgcgctgcgaacccttcgtgttcgatgcacacataatcggtgaatgtctttgtcaatccgcaataatacgtgaccttcagcattggaggcttatccgccttagtgtggatcgcatacgtgacatggttcacgttaaaaacttcaacgattgggacatccgcgcgcacgatagcgtcatcggccgaattacccttgaacttgacttcgaacgtgaatgggtgaccacaagctggcgcattcttgggctcctcgggccgtgctgtgcagaagcgcacgctcgggtggttctcgcatccacacttctcgcaaaccttgatcggggccataccgccacccttgccgggcttcttcggaatgactggatcgttgatcggtcccaagcgtcgcgcgtttcgtgcgaaatccagtaccaggcagtcctgcttatcgcttgcctggattgcgcacaaccgcccgatgaccgtctccagatcgaacccgtccgcgtaacagggtcgagtaccacgaccaagcatctgcacccataagccagtggacatggttgcacgcaagaccacgatcagatcgatctcggggtcatcgtaacccgtcgtcaggatgttattgttgatgagtgcctggatctggcctgtcttgtggaggtggagtgcttcttcgcgactccctgggccctttttgggcatccccgaatagacgactcgattcgtgattccttccatatcgagcatctgaccgatttcctttgcatgctcgatacctgtcgcgaacaccagccagcgcttgcgcgtgttgcggtacgctaggcactccttaatcgcgcgttcggtgatatggtcgcgcttcatcgattcgactagctgtttctcgactaactcacccttctgtataccgataccggtaatgttgatcactgcctgtgtcggccgggacaccagcgggatgataaacccctctgcgatcagcttattgaagttctccagatctgtgatgtcgtagcacacatccgtaaatagtccgccttcctcgatcagttcgccctgccccatgcggtacttggtagcagtgagcccgatcactttcaagttcggattcactttcttcagaaaggaaatgaccttcatatacatcgttttgtcgttcgggcttaccaagtggcattcgtcgataataatcaaatcgacatgcccgaataggtggatgctcttaacgatcgattggataccagcaaagatgatcttctgcatggtatccttgcgacctacgcccgcgctataaatgcctgcaggcgcttggggccaagcggctaacaacttggcatggttctgctcaatcagttcttgcacatgcgtgatgactaagatcttctgattaaaaaacagcttgtagatcgacattagaaacagagcgatcacgatcgatttgccagtgcctgtcggcatggcgacaatcgggtttccgaccttggttcggaagtaattccaaatcgcttctaccgcatcgttctggtaccaacgtcccttgatcataggtcttttttcatctcgtattgttggcagcccgtgagctgcaattccttggggatttcttgcatcgccttcatgcagacccattgcccaggctcaggaccgatgaccgaatgctcgcaggtccggcaattgagatcgacatcacttctcgaaatcccgtggcagaccttattcatgtcacaccacttgcacttatagaaccctggcgactcattcatgcgcggaggaggtgtggtcattgcgaccaatgtcctgccccgttccaggtactgcgcgcacacttcgggatcgtaaggaacgatctcaagatggatttcatccgtgtttttattgaccgcaccgtataacgcgacggtaagacccatcttgcccatataaacattcatctggacataatgttcccacttacacgctttcacgcccttcttctgcagctcaaggaacgatttctcaccgtgtgtcttgaactccaacaacgcagcgacatccgggggcagatcaggtaatccgatgaccacaccatcgcctgagcctccgaagtgtccgtttgcgtcggagatgcggaactgtttcccgttggcgtcctgctggtacacctgacaaccgatcatcagaaatagcgcgataaaacgcccttcttccaaatgcccgcgattgaacaggcgcaggatacgcccagggaatttgggtttgatgagccaccggaagttgtaccacaccttgcgcgggcactcgtcaccgatcatcgatgcacccatgtgcgagcggtggctttcggtttcggttcgatacgcgtctccgatgtggggtagcacctttccctgccacccacggaaagacgcaccctgatcagcctcgagcgcctcgttgatcgccttatatgtcttggatgccatgtagatcatgcgatgcctcgcttgtcgcggcagcgcccacatgaatcgtgatactcgcccttatactcgacacgtatcacgcgcgggaagtcctcaccgcagaagtcgcattccccagcttgcccggggtcgaagtgttttgcccgagccgcaaccgtctgcacgtatttttccgtcaggaaactttcgcgctcttcggtcagttcaatttcatcagccatttgtcacccctaaaaagcaaccccgcgatagcggggttgcagatgcagtttagatcaacccgctgccgtctgccacgggggcgtagcggtctgggcggattcgactgcgcccggtgctgcgggagcgaccggtgctgcggggacttcgggagcggccggtgcagccatgctggcacgcaggtcggcttcggtaagcacttcctggcccttgtagaagtaacccggagcggtgggatgcgcgacccaaccttccggcgggaatgcaggaaccgccggagcagcaggcgcagcagggggcgctgcgggcgctgcgggcacagcaggtgcagcggtagccggtgcagcagccggtgcagcagcttccgcaggtttctgccagggttgtgcaccagcagtgaaccctgccggcgctgctgcgggtgctgccgctgcgttcggggtaaacccgccggtgaccggagcagccttagcagccgcagcagccggcgcgcccgaggcaggcttgccaacttcttcgacctgctcgttgatgttcttgtacgcggtcggctcgttgcttgcttcgtactcgccggtggcgggcttgaccttgacacgcaccttcagcgggatcccgtgcagctcggaggtatcctgcggatcggagttgcctacggcgtgtgccagagcggccagttgcttgcgaccgatatcctcggccaccggattggagttcttgacgttgaaacccgcaaagatcttgcggccggcgtattcaccgtcgatgatagccaggcgcactgccaaccgcagaccgccatcgcccgccttggtcggtttcagttcggattcatccaccatcacattgtaccaacctgccggcacgggtccgaccacgccttggtcgggcggaacgtcacgcagggaaaagtcgagtcttgccattttgttactccggagtgactgtcagttaagacaggattttataaatgaccgctgccatgatcggctgttccatcggatccagcaaaccactacggtccttggccgtaaactgcagatcaggttgcgtctgcaagaaacggaacgctttaccctgctggtctttgctgaccccaaggcggaagacttcatcgaagaaatatggcagcttcggacccagcttcgcaccgggcatggaaggaccgtaagtaacgacaccggtcagctcgttcttggtcggctccatcttggccgtcatgagaacgtgcttaccattgatatcgcggaactggcgcaccgaagtttccatcttttcgatgagctcgccatacgcctggcgcgggtctttcacaagccgcttggcgttattcagcacctgctctgcaatctcggacaggctgtccatgcagatgctatcgaagttctttgcttcggcgctttcggtgcaccactggaaggcgtcggagagatcctttacatcacggatctcgatcatcggcatattgtagctgagccactgttcctgcccaggaccgtacagcttttccaggttcttgcgcgatagcgacaacgcgccagattccgcgctgatcatcacgggccgtggcatggtggcgcacagtacggttttacccatacccgaatcgccatataccagacacttcacaccgctgttggcgccttgctgcgatgctgtggtaaaattgagagccatttcgaactccgtgaaagggtatttattatacggctgttatactgtttatacaatgactttttaagtgtcctccggagcacgaatagatatcgcagtcgggaaacggggtttatcttttattcccttgggaaagaacttgaacttgacgatgcaaccatgttccatcgcatcgtgtctggataaccacattgtgcggcggtcatcgtgtgagagattgccgggtccgatcgtgaggatctgatccttctcgatcaccttgcgcccatggtcgaacacatcgtgcaaagcgcgcacgatgaaattgccgaccatcccgttcggcaccattcccgcctggtggctggtgcggtattgcagacccagctcgttgcgcttggcttcgtttgtgttgctcagaccctcttcgatgtcgagcaacacaccctcgctatccaagaaatccttgatgcgcagtaaaccgccctcgcgtaccgtgcttcggctgggcttgtgcaacgcagtaggggagcggataatggtgccttcgaacccccggttcagatgggattcgtgcaactccatcaattcttccatggtgtgcaccatcgtcgacggcacaaggcgcaaatggccgacccacggtcgatgggaggcatcactggatcgctgcaactcttcgacttttgctttcagatactggtaccgatcccaataggtcatcccagcagtctcgaagttgatgcagtcgaacacccaccacaaggtgaagggctcgccctggatcgttccgagcatgctcgaggtaatacggcacagatccgggtgggtctcgctgtgcccagcaacttcaccatcaaaaccgtcgaagaacggtttgctatagaacaatgtggtgaagcggttcttatgggtcttgaggctgcgcgcatagaactgccccttgatattcaacccccggacaccgtcgacctttggttgcgccatcactgggaaacgcaccttggacgcatcataatccgaagcaagcataacacccatagaaacctcagaacagtggaagaaagatttgctcggccttatcttcacggatgctgaagaaagggatacgaatgcctagctccctgcatacgcagagagctaggaccgtcgggcgcagaacgcgtgcgctcattccttgttgttacccatctgcagaacttcgctgacggacttgaacttggagatcgcgtcctggaattccttgcgggcttcgtcgccctcgggcagctgctcttcgaagtccttgagcagctgcaggcgctgtttacggcgttccatttccaccagcaccttggcgaacgcggtttcttgttcgtgcatctgatccacgaacgtacgatccaccttctgcacgatccatttcggagcgtgttcgatgttgatgttgatttcgggggttgcgtgcacttcgatcacatacacgaccttcgtgccgtagggggtgatgaccacaacctcgtcgccgaccttcacgcccatcttcagcggcgccttgtaggtgtagtgcttcccaccatagacgtcgccttcgccgcgcacgttcgacgggaactgcacaacgatggtggtgtagtcttcctggatgaggctcagtaggtgcttcggggaaatcgtcatttcagtaactcctggatttgttggatatgagattttgcgatacgctgggaccgttcccggcgcatggcttctttcgctcgtttgtcgcatgcccggttggctgcaaagcgtgcctcgggattgttagtgtgacccttgacatgccgaaaccgaataccgagattgtgttgctccttgatcttctcgaagtaagcaagagcaaggcgttcttgttgcgtcacagctttttgcgcactcgttagcttatccatcgcacttgaacaatcgctctggattagcagactatcgccgttctggataaggcgcttgttcagcccttgccagatcgaattacatatcgccatcatttcggcggtattgttgttctcgacttgcgatacgacaataccacctccgccaatcttaccgcgaccgcaggctatccagtacccataacctgcgatgcggtgttcgtggtcgtatgaggcgtcacacataatggtgacgttcatattacccccgcttcggcttgacaatctccaaggccggcgcaccgtccttaatgatcagggcttggtcgaagaacttgcggtcgtcatcattcagcttgcgataagctgagacgctcaactccggattccgcttcacaagattgtcgacctggatctttcgttcctgcaactgcggttgcagcaacaccaaggcggcttcgtccaccttgcggttgatggtgtgctttcccttgagaacgtagccgtcgggaagcgcatagttgttcgtgccctcttccgggctggggaatgcccccgcgaagatacggttccgaagagccatttcttcaaccttcatctttgcaatctgcgcctgcagctcataccacttgccaaggtctgccggggtgaactgctgttgcgggatagcggtcatttcgttctcctgtctaattgggcgcgttgtgttaccgcagaaacataatagcacaacgcgcccacaatgcaacgactgttaactgatatcttgcgtcggctgttgcagatccacacggaccaattcatcgggagcaaacgtcaccctgaccacaccatcggtctcgctcagcagctcgatcatcgacacgttctgcaactcgattccgtccaccttgatagctacgggacgaccatcgcgatagaacacgcgcttcatgctttccgctccgaagcgacgatgccttgcagttccgcttccacattgcggttttcctcctgcgcgaggtacgcatcgaatttgtgcgggtaacgcttctgcagcttttcgatgttgagcgtctggaactcctccagcgaactgtccaacgcacgtgcgagcgccgctgcataccactggctgtcgccaccctcttccttgaggttcacgcgccccttttcgcccagcggttccagcgtgctgaacaccttcagcagacgctccaactgctcgcccgcttcggtagcgctacccagcacagcatgcaggatgtcgatacccttctgcggttcgtcgtgcaacaagtgcacttggatatcagcctcgccttcgttatacccggaggcgtaaccgaccgggaaagggcggttgtagaatagggctttcttgatcacgtccagcgatttcaagacccccacggcgtcacccatgatgtcaatcaggagttcctggctgacagtcttgatgtggaaatcgggcgacatggtacgcgcggccaactgctcataactttgattcatttctgacactcctgtggttaatgcggactgcaaatgtattgcgcccaccttcgtgagcgcaatagggtcttatgactttttaatgggtgcataatcggggatatgcagcacccggtaggctttaccgtggaagctgtacgtgctcgcgagcttcgccttctccacttcaacgaggtagccgctgtcgcaataggagcggatgacctgctccagtgctgcggttggcccattgcgatggctcaggaagttactagcacggcacacgcgcatctgcaagaacttgcgaggcacgatgttgttctgccacacgttctccggaataccatagccgggggctggcatcttttccgtgtactccatcaggatgtgagccatcttacgctcgcgcgagtcgtcatctgtaccgacttcacccgcaccgatcttccggctcatcaattcgatatctttgcggactaataccaatgcccaatccagatgcaccttttggataatcggttcgatgtagttgtcggcgacggcgagcaatgcggcgactcgcatcattttaagtgatgcgcgattccacatctggcgccacatctcgtctgcggtgctgttgatctgcgtatcgcactcgagctcaaacgcacgcatcatctcagacgcttcgttggtacgcgtgactaaagtgtgctgcccacggtcagcgatctgcatcgcgtgtaagcagagctcagcgatcgcatcgcccagcgctttactgggctccatcaccgggttctcattcaatggtgggcgatcccctgtgtactcgacaatattgaaacgggatagaaatccgtcctccatcatcgtctgcgtcagggaatcataaaagcgccctggtgtagactccccgatcatactgtaagcgaccgatgtcacactaccgatgttggaatccttattcgagtagctgataccaccgacgatagattgcggtccagatttctggtacaggttcgtcatcaccgttcgcaactgcgccatcgggccatcgcgtccatcttccattgccaacctgcgcagcttatggccccactcacccgcaacgttcacgaagcacgggttcgctgcaatcgctttcgatagggctggtcccgaagcgaaatcattgaactccacaaaccgcagcgcagggggttggcgcttggcagctgcctggatgagagacgccacaccgctgtgcatcgcttcttttccgatagctgatcgggcaacaagaatgatataaaggttcaagcccgactgtggaattgcgaatgctttaccacatatgcctgccagcagacccagcgcggcgacgatcgcgacttccttcaccgggcgcggtgcgctcgaatagatgtacttcgcgatttcacccgctagaccgggtggccaagacaacccgtcggccggtgcttcgggtgtcggtgccagcatagcgaccgctgcattggtcgggggcgcagggatcacagggtcatagctggtaggtacgtgcagcatgactttctcacgctgcgcacgttgccgggctgcgtactcagctgctttcagaacgctcgacaactcaacagcctcttcgcgcgcctggcgtgcacgaataaccttgagcgtctcgttcaagtaacggtcatcgtcctgcgcctttggccgcttgcccaagttgctggcacggaacaagcgcctgcattgctcgttggacttgctgtagaaggtgaagatcgacagcaaagcaaggtcagcctctgattgcgtaccgtaccccatctcggtgaacgaacccaggatcttgtcgtctccctcaccctgggatgcggtggcgttacacagcgcattgaacttatcaccgttgctcgcactcatcgcgcgatcaactagatcctcgtcgctgagctcctcatccaactcttcgagcgagatgcggctatcctgcccgcgtcgcatttcggaagccatggccagaagcaggtcttgctgctcgcgcaacgggcgagaaagaacgaccttacctgtggtaatgatgaaccgctcttgcgagtatacctcaacgccatcgcgacgtgcaccgcgtccgatcgtaccggtcacccagatgtgcaaccctttgccagactgcgatgactcggtataacaatcgaacgtctgtgcgatcgtccaatatcggttgaactgttcctgcgttgtccacttgttgcggtcttgctcgttggtgacgtctttgacgtcaaggtcaatacagctgaacgggtcgtcagcactcagtacatacccgatctgtccacccaatccgtaggcgatcgttgctgcttcatcgaacgttaaccagtccgatggctccgttacggacgcgagcttgccattcctggtcctgggtgccttgcgaatcttggcatcgggatcatttggaacggtatagcaccactgcggccgttggcggagttccagaggaatctggctccaaccttcggcgtgcttcatttggtggcggccccattggtgcgctttctgatttcttcttgccatgcagcaaggtgcggttcgatcgttgcacgctcccatacgaccaactgctggccataggggaagattgcgcccggaagcaaaccgcgcttacggcggaaatggatagcagggcgggtcacgcacaagcgctcacagatttcgctggaagtgatatacttctgatcgaagtggatctgtggagcctccacaacttcagcagtgttctgttcaatcatctgactcattacgaccccgcgtgttaaactggtgtatagcatacaggcaacgtgcgtttatcgcaacgggcgttagcgcttccgttttgccttgatccgctggtaattcacacgtgcacttgttacaaaatcatcccacttggcacgcgcctctttggcgtcccgcaccgcattacgccaagcgacacgcgcttcctccagctcctgctcatattgctcacgagcagcagtcttcttcggcgcgatgacatcggtgctcagcgggatttcgtcctcgtcctcggttgcccagaacaccgacaagcgcatcgcgtgctgcaagctgtcctcgaacgtaatgattgcacgcttcaagaacgttgagtacgacccgatcgcttcctccagcttccgaggttcgaaagggttaaaacgacctttcttttccttgaacaccggagcgcgactgttgtaatcatcatacagatccccatcgaactcgtagacgaccggtatcggtgcaaccaactcttcgggcggcaattggggaatgaccacactgtcgaacaccggaagaccgtcctcggagaattcaggtgcgccgtactgctccaagttgagccgcagatctgctaagttgccgttgtggttaactgtcatgggctttggtcgagtaaatggggttcatgaggttgtcccatgtgagaggcttcggtgcgttagcgacacgacgccttgcggtggtaggcgaccatccgatgcgctttgcgatctgcggaatggaatacagtttaccttcgacaacttcggcgaaccttgccgcgttcttctttcccgctcgcttggcatggtgggttgcgcgttcgggtgtcagttcccaacacccgggctcgttatcaaagttcatcgctacgatggtacctgtctgcgttgcgggtgcggataagtccgagcattgtcaaccagcgacggatcacgactcactctgttcgcgcaggtgttgcgcgacagcagccaacccttgtgctatcgcaccaactacatctgccccgctcgccggtccatggtaagatgcatcgcgaacagaattcaccgcaggattccagaaacagtctagcgcatcagctagttgcccgaggacattcttattctctgaaggctcaggttccgcgcggggtctgccttcgatatccgcaagcctgtcctgaaagtgttccttcacccccaccggctggcgatctgcatcgttgagcgcacgcattgcatcggtaggcgccgcccaatgcactccaccaacaacaggcaaatggtcatgcacatcaccgttcggcgtagcgcgacagcagtcgcacgcacgatcggggtcggtcaacgcgttattcaagaacgcagcaagccaggcccagcgctccggcttgctgcccttgcgcacatcggccggcatgtgggcttcggcttcgcgtaaaaactcaggctggatggtggtggagagggtttgcgcgatccccacggcgtgcttctccgcgctgggtccgacaaaattaccgatgatatcgttaccatcggtgagttggtagcaggtctgcattttccgcaacttccaacccgcgggcagtttgttggtgtcatcgttcatgttctattcctcagtcgattgcagcagtagcccactgaacaacatccagagcctgcgcatagggaaggaagggaccgattgcagaatggtcacggaactccataccggtaagaatggactgtgcgcgtgagcaagtccaggtgtcgatcgggttcgggttagccttgaccacaatacgctcgcgttttgcaggaagggtgaagatgttcattggcgtgctccagttggtgtaagcgcactataacgcgcgttaagcgggcacgcaatgattatttggaagtttcttgcgtgtatcggatgtaggcagtttccggatcgccatgcgcctgcagcaaagcccaggcctcgggaagattgaggcccagggtttcgcgcagaagcataacgtcatcgcgccattgtttcgatgggatgacgtatgccatatcagcgcttcttaccgccgtcgatgctggtgacggtagccctgcgggaagcagctgccgccagctcgcccttgagcacgtcgacgctgcgtgcaaggccgatcatcttctgctgttgcccttcgatgtactcagcttgcgcgctcaactgcgcagccaacgcaccgatgatgcacttcagatcggtggcgttgcctttgtcgagaacgatcgtaccgatggtcaattcatcgttcttgtccaggtagcgcgttccgatatccagcatccgctcgtaatttgctttcgaggcttgttcgccgagaaccgtcatatcaacccccgttgctgaagttggacaaggtcataccgccaacaactgtcgacgacgtatcgtttagcacgtcctccagcagttcgatatcttgcttatacgcagtggggtaggtgcgctggatcttatccagctcgaccagcgccgtagctgcgttgagggtagcagcaaggacatccccgcccaccccgctgtgtatcagatggatcttgcgtttcatttggtctgttctccgtgggacatgataagttcataaactaccgcttgcgttgcgtatgcacgcagttcttcacaagggttcttttcgttgatgccgcggaagtattcctccaccacatgcacagcttcatgcgccagcaacgcatacacgtcaccgatagtcatcccgggcctggtgcacaagcacacgacgcaggtggtgttgccatcctcgtcttcgaacttgtgcacctctgcgccatacccgctcttaacccactcatgcgggtatttgattttcagatgtgccatcgcctccatgtaatcggattcgcgcaggcataacaccaggaacggtagattgggcattgctttgcgattgagccaggtgagtgccatgtggtcatcctttgtctgggtgcgcagtataacacccgttaacagctatcacaatggtcaatggtagaagtcaggatctccgatggtttcttcccagctaccctcgtactcgtacgacgaatcatgacgggttcggcgatcactggtgtcgtacgcgcgttcaggatcacgcttgagcgctaaggtgacttggccaggcgaaaacagtgcaacaccgtctggatttcttttgcttgacttttcacccttcttgacctggaaccctttagccttccattcattgtaggtatgcatgtcactctccttcgctaggaaaaggcacacgcttcttcagcgcttcttgaagctgttgcgacagcgtttgtatctgcgtcgccaaatccttggcttccgcagtagccgttgtcgaacataagatgacgagacactgcttacgcatcattgccgcactacccatgaacgaattgtgcttgtgcgcgagtagcctacgttcgcgacctgaaagtggcataacattctcctggcgtttgctgtgatactgctgattgggcacaacccgcgcagcagtgtgcatgcgcgggttgtagttcgttaggtgcgtgggcccagcaccttcgcaccgcgcaggtagcaaaggaactgatcctgcacagtaccacgttgaaacgaccgatgcacaaatgtgcccggatacttaacgtcggtcttgaacttttcagcccactcctgcaacatcaaacgcggaatagctgagtaaaccgagtacaggggtggcacaccttgcatgtgatcaccgagcaccagattgacggtatcgtggtcgatcgaaaaagacttcgacttaatcagctccgcatcgattacacaacgcccattcactgtgaagttgttcttgagattgccctgcttcaagggatcgatgtgcgtgtggttaagcagtgaccacactgtgctgatcggagtgggctcacgatcagctcgctggcttggcgccgtcctatcgatatcgaccttgtctcccgactccaccttgcgaactgtgacttcaggacgtcccgcacggcctgccacttggcagtacagcgatacactcttggtcggggccggcggagcgtagttggtcggaaccgtgaacaattcccagaacgcttggttgccgttgacagtgatcgaatccgccgcaggccactgccatgcggttgcttcagg

SEQ ID NO: 15 - protein, 604 aa, unidentified
  REGION 1..604: note = the amino acid sequence of tail fiber of a bacteriophage
MATYRTILTKKGKELIAAAGASGIPIVLSDMAVGDGNGNAVTPVETQTTLARERYRHAVNQLTVDVSDASRFTAELLIPASVGGFTMREVGLYTNNGDLFAVANVPASYKPTDTEGSFGDTAIRMVFIVANASVVTLVADPNVAVATHSWVMNNVNAATIIPGGLTGQFLAKKSNANGDIDWVDPTQGITVIVFSREETQTLAAGQTVVDLAQITAEGVAVYIEGTRLRAAEFSVTGDSQITLASAHPAGSKVTAVQNEEVGATDVLLRPLNLADVPDKAVARNNLGLPNWLATSNINWNQLINVPAYALRWADWSEVTNKPTTFPPSAHSQDWSTIDGKPDTATRWPTWNEVTGKPSTFTPSTHTHAISDVFGLSDALNSKLGNSGNQSLAGSLTLPPVAGLPISPDGDAARQLRTEWQGIAGSVEYLSVNFVRKASGTDWQTAAWRIQRQVGGTAVGYIEIGGNNESKSVVLGAYISGTAWLTNQGAWGASGGFDFGSSRKLKLIEGEMPYGLEHVRKVSTLIGKYKPEYNKDGRTRLFFDAEQLATIIPEAVDENGVEFNGEMVPVVKIDQVLPPAYRAISELAEMVENLSREVAALKAGK

SEQ ID NO: 16 - DNA, 1815 bp, unidentified
  misc_feature 1..1815: note = the nucleotide sequence encoding amino acid sequence of tailfiber of a bacteriophage
  source 1..1815: mol_type = unassigned DNA
atggcaacttaccgcaccatcctcaccaagaagggtaaggaactgatcgccgctgctggcgcaagcggcatccccatcgtgctgtccgatatggcggtcggcgatggcaacggaaacgccgtcactccggtggagacgcagaccacgctcgcgcgcgagcggtatcgccacgccgtgaatcagttgaccgtggacgtgagcgacgcgagccgtttcaccgctgaattgctgatcccggcgagcgttggcggattcaccatgcgcgaggtcgggctttacacgaacaacggcgacctgttcgccgtcgcgaacgtgccggcgtcttacaagcctaccgataccgaaggttcgttcggcgacactgcaatccgcatggttttcatcgtcgcgaacgcgtccgtcgtcaccctggtggccgacccgaacgtggctgtcgcgacgcattcgtgggtgatgaacaacgtcaacgcggcgacgatcatccccggcggcctgacggggcaattcctcgcgaagaagtcgaacgcgaacggcgatattgattgggtggacccgacgcagggcatcaccgttattgtgttctcgcgcgaggaaactcagacgctcgccgctggtcagaccgttgtcgacctggcgcaaatcaccgccgagggcgtcgcggtttacatcgagggcaccaggttgcgcgccgccgagttttctgtgactggcgattcgcagattacgctcgcgtccgcgcatcccgcgggttcgaaggttaccgccgtgcaaaacgaagaggtaggcgctaccgatgttctgctgcgtccgctgaatttggcggacgtgccggacaaggcggtggcgcgtaacaatctcggccttccgaactggctcgccacttccaacatcaattggaaccagttgattaacgtccccgcgtacgcgttgcgctgggccgactggtcggaggtcacgaacaagccgaccaccttcccgccgagcgcccatagtcaggactggtctaccatcgacggaaagccggacaccgcgacgcgctggccgacctggaatgaggttaccggcaaaccatcgacgttcaccccgtcgacgcacacgcacgctatttctgacgttttcgggctttcggatgcgctcaattcgaagctcggaaactccgggaatcagtcccttgccgggtctctcactcttccgccggttgctggccttccgatttcccccgatggcgatgcggccaggcagttgcgcaccgagtggcaaggcatcgccggctctgtcgaatacctttctgtcaatttcgtccgcaaggcatccggaacggattggcaaactgctgcgtggcgaatccaacgccaagttggcggaaccgctgtcggttatatcgagattggcggaaacaatgaatccaagtcggtagttctcggcgcctacatttccggtaccgcatggctcacgaaccaaggggcatggggcgcgtccggcggtttcgatttcggctcttccaggaaattgaagttgattgagggcgaaatgccctacggtcttgagcacgtacgcaaggtttcaacgctgatcggaaaatacaagccggagtacaataaggatgggcgcacccggcttttcttcgacgccgaacagcttgcgacgatcattccggaagctgttgatgaaaatggcgttgagttcaatggcgaaatggtccctgttgtaaagatcgaccaggttctaccgcctgcatatcgcgcaatctctgagcttgcggaaatggtggaaaacctttcacgcgaggtcgctgcactgaaggcgggcaaatga

SEQ ID NO: 17 - DNA, 46393 bp, unidentified
  misc_feature 1..46393: note = the genomic sequence of a bacteriophage
  source 1..46393: mol_type = unassigned DNA
acaccgccgaatcttcaatctgagtggcatttcgcgttcaggtttctaattagactgttaagtttagaaattcacttcagatggcgaaaggaaacgggcagaaagtcaatcgcagcgggcttgcagccgtgttcggcgtgtcgatgccaaccgtcgatgcgtgggtcaagaatggctgccccggtataaaggatggcgttggcaagggcggatcgtgggagttcgacaccgccgacgtggcgcgatggctgcaacagcgcgcggccgacgatgctggtggcgccgaggtcgcggacgagaacgcgctgaagcggcggcgcatggccgtgacgctgaaggcggacgaacttgcgcttgcgcgtgatatggccctggtggcgccgattgccgatttcgagcgcgcgcaggcgaagctgttcgcaaagctgcggcagtccatcatgaccgtcccggcgcgcgtcgccatgtcgctggtcggggagaagtcggaaacccgcatcaagcaggttctgaccagcgaacttgccgaagtcctcgcgaaggtcgctgaacttgatttcgaccttgccgacgaagacgaagacgaagacgcgtgatcgacgcagccgacattgtcgacctgaagcaattttcgaatcacgacggggttcgttccgccatgcgtcgcgcggtcgcgcacctggtgccgccgcctgacatcctcccttcgaagttcgccgaagacaacatcgaaatccccatcggcaacgccgtccccggcccgatccgcttcgatgcagccgcgtatcagcgcggcatgatcgacgtgattaaggagcctggcatcacgcgcgtgtcgtacatgctcagcgcgcagttgggcaagacgacgatccagcagtgcattacggcgtacttcgtcgcgcatgatccgcgctcgcaaatctggctgatgccgagtgagggcgacatgctgactttccgcagcacgaagttgcagccgatgcttgatgcgaaccccgacatcgcgaaccgcatggcgaagccgcgcggccgcgacgggcagaacaacggccgcatgatttctttcatcggcgggtggctgatgttttcgtgggccggctcggcgaagacgctgcgcggtcgctctgcgccggtcaccctggcggacgaaatcgacggcatggagaacgccggaaccgaggaaaaggacgaaggcgaccccgtgcagttgctgatgcagcgcgcggcatcgttcagttcgtcgggtcagaacctgcacatcgagtccagcacgccgaccgtgaagggctttagccgcatcgagtccagccacgaccagggcgaccaacgcaagttctggattccctgcccgcactgcggcgaacgccaggtgctgaagtgggataacgtgacgtggcaaggccgccaggacgaccgcgagaaggacgctgcgttcagggaccacgaagtcgacacagccggctatatctgcgaccactgcggcgtcgtgtggagcgatggcgaccgcgtcgcggctgtccgcgatggcgtgtggatcgcttcgcagccgacgaagaaccacgcgtcgttccacttgtctgaactgtattcgccgtttcggaagttgcgcgacatcgtgcaatcctaccttgataaactggcggtcgacagttggaacacgtttgtaaacgtgtcccttgcagagacgtacgaagagactggcgacaaggtcgaccccaccggccttgtttcgcgcgctgtcgagtacgtggcggaagtccccatgggcgtcctgtacatcacggccggcgtggacatgcagcaggaccggctagagtgcgaaatcgtcggatggggcgaaggcgaacagtcgtggtcactcggctaccacgtcctatggggcgaccctgtcggtggtgacgtgtgggacgacctggaagacctactagagaccaccctgtctcacgaaagcggcatgcagatgcgcgttcaggccgcctgcgtcgacactggcggcaccagcggcatgacgcaagcggcgtacgactggctgcgcgggaagacgggccggcgcctgttcggcatcaagggcgtacccggctggggccgccccatcgtggagaaagtggagcgcaagcagtcaggtaagaacgcgcgcaagatcgacctgttccgcgtaggcgtcgacgaaggaaagttgatggtgatgcgccgcctagccgtgcagaaggagggtccgaactactgcaacctgccggctggacggttcgaccttgaggaatgggcgaagcaggcgaccgcggaaaagctgcgcgtgaagtacattcgcggccaggccgttcgctactggtggaagcccgacaaggcgcgaaacgaggcgctagattgccgggtgtacgcgaccgcagcgctcaagatcatgcagccatcgtttaaacggcttgcaatcaggttgaatcagttcgtggcacagaaccccgacgccgcgaagcttgcatcgctgcaaaaggtcgtcgacgtggtgaagcaagttgcggccgctgtcgcaccgaagaaggcggcggaaattccgcaagtgtcccaacccgaggaagcaaagcagactgtgcgcgttcacaagaccgcggcagcgcgccgtgccgggaaaaattgggtgaatagctggtaaccgtgaccatccttccgaccaaaattcaagccggcgaaaacttcgccgcttccgtcgaacttccggcctattccgatgggtgggtggttcgtctgtcgctgcgtgggccgtcatcggtcgatatcgaggcgacgcagaccgggagcgtgttcgttttctctgcttcggcggcggaaacggcggcgtgggttgctggcgaatactcgtggttcgtgcgagcgatcaagggtgacgacgcgttcggtgttgcgcaatgccgcgtcaccgtgcttcccgacctggcgaacgtcgatgatggctacgatgcgcgcagtaagtggcaaaaagggcttgaagcaatcgaggccgtaatcgatagccgcgcgacgaaggatcaagagcgctatcgcatcaacaaccgcgaactgtaccggacgcccatcggcgacctactgaagctgcgcgcgttttacgcgcagaaggtccgcgaagagtgctgcaccaacggcggcgccggccgcttccgcgatattcgcgtcggcttcggccccacccgctgacaccatgaatctgatcccgtccattttccgccgaaagaacgattctgcgccgagtcctgcggcgccgctgaagcagtcgcccgcgcgatccttcacaggccgcgcgctggacgctatccgcatggtgttcaactccgcgagcgtcaaccggttgaccggcgactggggcaccgagccgcagccggccgactggatcatccatcggcactggcgaatcctggtcgcgcgctcgcgcgaacagttgttcaacaacgattatttcaaggcgtacgcgcgcatttgcaggcaaaacatcgtcggttcttctggcctggtgttccagtcgaaggcgcgcacgtctggcggcaagaccgacaagaaagcgaaaatcgcaatcgaacgtgcgttccgcgactggtcgaagcggaagaactgcgacgttgccgggaagctttcgtggcgcgggttcttgaaccactgcgtgcagtccgccgttaccgatggcgagttcatgctgcggaagtacgtcggccggcaatatggcaagtacggatttcagttgcaggttttggaccctgtgcgctgcgccgtcgattacgaccggatggggctggacggtggcaacttcattcgccacggcatcgaattcaacatccttggcggcgtggtcgcgtatcacttcaccgttgcggccgcaaaccgttcgtccgatgcttacagctacgccggacgctcgttcatccgcgtacccgcgaacgaaatcatccacggtttccgagtggaaattgcgcagcagaagcgcggcctaccgtggctgtccaccgggcttttccgcatgaagcagatgggcgcgttcgaagacgcggctatcgtgaacgctcgcgtcggcgcggcgaaactcggtgttatcgagtggaaggagggtgaaggtccggaatgcaatagcgcggatgatctggatgaagtgccggaaatctccggtgatccggggacgttcatttcgttgccgaacggcgcgtcgctgaacaagttcgaccccacgtatccgtccggcgagttcgccatcttcatgaaggcgatgcttcgcagcctggcgaccggtggcggcgtgagttaccacacgctcgcacaggacttggagggcgttaacttcagcagcattcgacagggcacgctggacgaacgcgagcacttcaaggaaatgcaggaatggctcatcgaagaggctgcggaccccgtcaccgaaacgtggtttgaacaggccatgctgcgcggcgcgattgtcaccgacaacggaacccccctgcccgtttcgaagatcgaacagttcggcgactacgaattccagggccgtcgatgggaatggatcgacccgaacgccgacatgcaggccgccgaaggccggaaaaacaacctactcgcgtcgccaagtgaaatcatccgcgaaagcggccgcgaccctggcgtggtgttccaggaaatcggcgaagacatcaaggcgatgaaggcggccgaaatccccgacgaagtcatcatgatggcgatgggccagaaacttaccgcacccgcaaaaccgaaagacaaccaggccaatcaaaatgcagcataagaccgcggcgcttctgcgcgccattcaggcatccggcctggtcaccaggtccgcgccggacgcatcgcagcgactgaaggaagtgcacgcgcgcgccgctggcggcgtcatccatcgcgccgctgaagtcttgagcatcgacgaagcgtcgcgcacggtcgaactggcgttttccagcgaggcgcccgtgaatcgctggtggggcgaggaaacgctgtcgcacgacccctcgcacatccgcatgggccgcctcaacgacggcggcgcgctgctgtggaatcacgattgggacgaccagcggggcgtagtggaaagcgcacgcgtggacggcgaccgcaagggccgcgccgtggtccgcttcagcgaaagcgaggacggcgaggaactgtggcaggacgtgcgcacgaagatcaagcggcacgtatcggtcggttacttcatccatgcgatgcagcttatcgaggtcgtcgacggttacgaacgctggctgattacggactgggagccgtacgaaatcagcatcgtgagcgttccggctgatacgactgtcggcgtcggtcgctcggcggaaattccgcaagtggaaaccggcgatgctggcgtggagaatccgcaactgagttctaccgttaccaatcccgaaacccggacccaaaaaaccatgttcgaaaaaatcacccgcaacgcggccggcgacctgatccgggcgaaggtggatgccgaaggcaacatcgtcgagaccctggaagtcatcgagaaggccagcgacgcgcagcgtcaggcgacccagcagggccaggccgccgagcgcgcccgcgtgaacgaaatcgccgcactggccgagcgcttcaagaagggcgttccggacggcgccgcgctggccgcggtcgcgatcaaggaaggccgcagcgtcgccgaatttcaacagcagatgctggacgccgtcgacaagcgcatgacgacccccatcgaccagcaggataccagcgccgccgatgtcggcctgagcgagcgcgagatttctcagttcagcctgctgcgcgtggcccgcgccctggcgaaccccggtgacgtgtcgctgcgcaatgcggccggcatggaattccgtgcatccgaagccgcggccgagcgctacggcaaggacggcagccggttcgtcatcccgaacgaagttctgcgccgcgcagtcggtggcgaattcagccgcgccgcgatttcgaccagcagcaacgccaacggcaacggcggcctgaccgtcgacaccacgttggcaaccggttcgttcatcagcctgctgcgcaaccgcgcaatcctgctgcgcaacgcccgcacgctcggcggcctggtcggcaacgtcgacatcccgaagcagaccggcggcgcgtcggcgtactggatcggcgagggcgacgacgcgcaggaaaccggtatcgaacttggcatggtgtcgctgaagccgaagaccgtcgccgcgttctccgacatgacgcgtcgcctgctgaaacagtcgagcatggatatcgaggcgatgctgcgcgacgacctggcaatcgctctggcgctcgccatcgataaggccggcttctacggcagcggcagcgaataccagccgcgcggcctggcgaactacgacggcctgaacgcggtggtgctggccggcgactacccgacctatagcgaagcggtggacatggaaaccgccatcgcgctggacaacgccgacgtggattccatgcggttcgtcggcaacgccagcctgcgcgggtacgcgaagaagacgcttcagttccccggcgtgaacggttccgcgaagctgtgggagccgggcaacaccatcaacggctacagcgtcgacatcacgaaccaggtcaacgcgggcgacacgttcttcggcaactggaacgacctggtgtgcggcatgtggggcggcctggaaatgaacgtggacaccgccgcgctggcgaagtccggcggcgtgcgcatcatcgtgttccaggacgtggacttcgtcctgcgccgcgtcgagtcgttctgcgtcgcccgcaaggcgtcgtaaccatctgcatgtgagcgaggccgctacggcggcccgctcttgcgaaaccggagatacaggaagatggaaactgtgttgatgaagctggtgggtgcaatcgtggtcggcggccaggttgtttcgccgcccgcggtcatcgagtgctcgccggccgaggctgcgaactacgcgcggcgcggcaaggccgtcccggcaaccgatggcgatgcaccgagtgccgtcaccccgagcgccgagcacgtcaaggccaccgccgcggaactgcgcgccgccgccgacgccgcggccgaagcgctgcgctccgctcaggcggaagcagacaagaccgaaggcaagacgcgcgcacagcgcaaggtcgacgccgaggccgtggacgcggcgaagctggcggccgaaaccgcagaagcggcagcggccgccgcggaagcggccgaaaccaacccctgacccacaaccaaggaaaaccgcaaacatgttgcgcggactgaaacccaccactctcggcaccaccgcaatcgacgcccgttcgttcaaggggcatgcgctcgtcctcctggcgcgtggctccgcaaccggcaacctcgccctgaccatcgagcacagcgacaacggcacgtccggctgggcgacggcgcaggccgtcacgttcagggccggttcgaacctggccggcgccgaggcttacgccgaaatcgatatggacaagttcaagcggtacatccgcaaggcttcgacttcggtcggcgacttcgccgcgctggtcgcgcaggtggacggctactaatgccgtcaccggagtgggaagacctggacgtttttttcgacgacttcgcgacgcaagttgcgttctcgtcgccgagcggccaggttctccccgtcttccgggccatctttgacgatccgtatttcgacaagcagctaggcgagtacgtcgccaccgatggcgacccgcgcatcacctgcaaggaagtccacgtgttgcaggtgaagaagcattacgaatgcaccatcgcaagcatgcctgggcgcaaatacacggtgatccacgacccgaagttcgatggcacggggacgtgcgtcgtttacctggggcgcatcgagtgatggtgtagcgcgtggctagtatcagcatcgacattgacggccggggaattgattccctggccgcggcgtttggagcgaccgaaagccaggtccgcgccgcgatgcgttcgacgtacaacaaaatgggccgatggatgcgaacgcagtcggtccgcggcctgtcgtctaagctgaagatccagcagaaaattttgcgctcgcgaatccggtcctaccgcatgcaacacggcatggaggacggggaaggcgtaaaagtgtggtacggcatcaaggaaatcgcgttctcacgcctgaacccccgcgagtccgggaagggagtcaaggcggccggcggtcgatttgaggaaggcgcgtttatcgccaggctgtacggcaaagaccaagttctgaagcgcatcggcaaggaacgcgttccgctgcgcgtggtgtatgctgacatcgcggacgaagccatcacgtacattgaggacttcgttatcggcacgactgcgttcgacgtgcagttttatcgcttccttgagcacgaattgaaatggcggacatcgatcctgaagtaaatttcgacgacctgcacgacgcgatcaaatcgcgtatcgttgcggcgtttcccgatttccagaccgtcgagttctatcgcgacgatgaggacgcgctgttcccgacgccggcatgcctgctggcgatgaccgaggccgagccgcagccggacagcgacgcaggcgccgaacagttgccggttctgctgcggttcgaagcaagtatcgtgatggcgcaccgctcgccagccacccacaaggccgtgcgcaaatcggcactagccctggcgacctggctgtataagttgaagcgcttcccgccgtgcgatccggtccaggtgatcgcggtcgagccggacgaatttgcgccgaaggccgacaagttcgtgacctggcgcgtagaattcgtgatgctggggttcttcggcgaaaccgcgtggaagaacgacggcaccgtgccgaccgatgtcatgttcagttggtcgcctgaaatcggcgccggcaacgaagacaagtacgccaacgcagcggagccgctgccgtgagtgctgaccacgaccgacgcatcggcaacctggtgatgatcggcgtcatttccgcgcttgacgaagcgaacgcgctcgcacgcgtcgatgtcgatggcctgattaccgactggctgcacttcgcggccctccgcgccgggcctggcgtgcgcgagtggtccgcgccagaagtcggcgaacaggtggtcgtggtttcgccttacggcgatccgtcgcaaggcatcatcgtttgtagcgtgtaccaaagcgcctacgctgcgccggccaacgtcaagacgaagcatcgcaccgagtttgcggatggcgcgttcatcgagtacgaccgccaggcgcacggctacactgtcgaagttccggccggaggcgcgatcacactgcacatcggacagacgacgctcaagctgcaagacggacaggcgacgctcacgacgccgaaacttgtcgttgactcgccagacagttctttcaccggcaaggtcaccatcgctggcgacacgaccattaacggcgcaactgccgtgaagggcatcaagtcgaatggcgtcaacatcggcagcgaccacaagcacagcggcgtgcagccaggaagtggcgtgaccggcaatcctcagtaagcggaaattccgcaagtggccgcgcaacgcggccacgtccatcatcgcaatatgattgggaccagtgcggccaccggcaaattgctttccggaatcgaccatcttcggcagtcgatcacggacattttgacgacgcccatcgggtcgcgcgtaatgcgacgcgactacggcagccgcctgttccagcttgtcgacgcgccgctgaacctttccacgggcatggacttaatggcggccactgtcgaggctttggagatttgggaaccgcgcattcgcgtcaccaaggtgacgccgagcgtcaccgctgccggtggcgttcagatcgcggtggagggcgaatatctgccggacgggcaaatcatcgtcattgacggaatcgtggtgaaataaatggccggcgcttttaccaacgtcaacctttcccaactccccgtccccgacgttgtcgaacagatcgatttcgaaacgatcctgaccgacatcctcgcggacttcatcgcgcgcatggctgccgctggcgtcacctataccgcgctggtcgagtccgatcctctttacaagctggccgaggctgccgcgtatcgtgaagtgactatgaggcagcgcgcgaacgagtcagcaaaagccgtgatgctttcgcaggccatcggtagcgacctggatcaacttggggcgaacgtcaacgttcagcgcctgctcgtcaaccctggcgacccgaacgcggttccgcccgtgcctgcgacgtatgaaagcgatgaagacttccgcgctcgaattcagttgtcgttcgaaggctacaccaccgcgggcagcgaaggcagctacgtgttccacgcgctatccgcggatggtgacgtgaaggacgtttcggctatcagcccgacgcccggcgttgtgcgcgtctacgtcctgtcgcgcaccggggatggaacggcggcgccatcgcttgtttcgaaagtcgatgccgtgctgaattccgaagacatccggccgatgaccgacaacgtcatcgtttcctccgcgggaatcctgccgttttcggtgcaggccacgctcaccatgtatcctggccccgaccccgaagtaatccgtcaggcagcaatcgcagcgctgaacaaatacatcgtgagcgtccagcgcatcggttacgacgtgacccgtgccggcatcatcggtgcactggtgcagcctggcgtgcagaacgtcgcccttacactccctgcggccgacatcgtcgtgagcgacagccaagcgccatactgcaccgcggtcaacgtcagcaacgcggattccccgaatgtctgacaccctgcttccatctagcgcgaccgtaattgaacgcgcaatggagttagcggccgcccgcatcgagggcgtcgcaacgcctgcgcgttacatgtggagtcctcagaacgcgcccgttcaaatcctgccgtggctggcgtgggcgttcagcgtcgacacgtgggatacgacgtggaccgaggcgcagaagcgcgcgaccatcgcggcatcgtacagcgtgcaccgtaagaagggcacgattggcgccgtgcgtcgcgcgctgtccgcgctggggcttggcatcaccatcgttgaatggtggcaggaaacgccacagggcgatccatacactttccgcatttcggttgatgtcgaccagggcggcgcacagcagggtgcgctgtcgaaaattatcgaagtcctcaacacttcgaagaacctgcgttcacacctgaattccgttgacctcactgtgacgacttatgcgacgccgtttttcgcggcggcgacgcttgtcggaaccgaactgaccatcctccccggaacctgatacatggcaacttaccgcaccatcctcaccaagaagggtaaggaactgatcgccgctgctggcgcaagcggcatccccatcgtgctgtccgatatggcggtcggcgatggcaacggaaacgccgtcactccggtggagacgcagaccacgctcgcgcgcgagcggtatcgccacgccgtgaatcagttgaccgtggacgtgagcgacgcgagccgtttcaccgctgaattgctgatcccggcgagcgttggcggattcaccatgcgcgaggtcgggctttacacgaacaacggcgacctgttcgccgtcgcgaacgtgccggcgtcttacaagcctaccgataccgaaggttcgttcggcgacactgcaatccgcatggttttcatcgtcgcgaacgcgtccgtcgtcaccctggtggccgacccgaacgtggctgtcgcgacgcattcgtgggtgatgaacaacgtcaacgcggcgacgatcatccccggcggcctgacggggcaattcctcgcgaagaagtcgaacgcgaacggcgatattgattgggtggacccgacgcagggcatcaccgttattgtgttctcgcgcgaggaaactcagacgctcgccgctggtcagaccgttgtcgacctggcgcaaatcaccgccgagggcgtcgcggtttacatcgagggcaccaggttgcgcgccgccgagttttctgtgactggcgattcgcagattacgctcgcgtccgcgcatcccgcgggttcgaaggttaccgccgtgcaaaacgaagaggtaggcgctaccgatgttctgctgcgtccgctgaatttggcggacgtgccggacaaggcggtggcgcgtaacaatctcggccttccgaactggctcgccacttccaacatcaattggaaccagttgattaacgtccccgcgtacgcgttgcgctgggccgactggtcggaggtcacgaacaagccgaccaccttcccgccgagcgcccatagtcaggactggtctaccatcgacggaaagccggacaccgcgacgcgctggccgacctggaatgaggttaccggcaaaccatcgacgttcaccccgtcgacgcacacgcacgctatttctgacgttttcgggctttcggatgcgctcaattcgaagctcggaaactccgggaatcagtcccttgccgggtctctcactcttccgccggttgctggccttccgatttcccccgatggcgatgcggccaggcagttgcgcaccgagtggcaaggcatcgccggctctgtcgaatacctttctgtcaatttcgtccgcaaggcatccggaacggattggcaaactgctgcgtggcgaatccaacgccaagttggcggaaccgctgtcggttatatcgagattggcggaaacaatgaatccaagtcggtagttctcggcgcctacatttccggtaccgcatggctcacgaaccaaggggcatggggcgcgtccggcggtttcgatttcggctcttccaggaaattgaagttgattgagggcgaaatgccctacggtcttgagcacgtacgcaaggtttcaacgctgatcggaaaatacaagccggagtacaataaggatgggcgcacccggcttttcttcgacgccgaacagcttgcgacgatcattccggaagctgttgatgaaaatggcgttgagttcaatggcgaaatggtccctgttgtaaagatcgaccaggttctaccgcctgcatatcgcgcaatctctgagcttgcggaaatggtggaaaacctttcacgcgaggtcgctgcactgaaggcgggcaaatgatatggcttcaggatatagaagcaacaacgttgattttgacgacctattcgaacctgaaagcaatggtaacggaataacactttcaggaataaggaaggatggcagcgggcttaggtacgcttctcgcggaagcactgcgaagcgcgatgatgtcggatatcgcgtggacggtcaggatgtttctaacgtctggatggctaagggcacaacgacagtcgttcgcggcggcgtccctgacaatatctcgcgatcccgcgccgcgacgcagaaccagcaggtaacgctaaacgcgttcctgacttacgaccgtaatgggtcggtttcgtggggcggcggcggaatcggcacttcggggagcgggcaatggatttccaacgcatcgtcaaccgttggtgacaattacgacatcaatgtatcgaccacttcgcagagtggcgacggcacgctgactggttcaaacaccggttggcagcagatgagcgtatcgcgaagtgtgttgcttcagacgacgacaacgaacggcgacaggttcggcactgttggcttgaatgttcaaatcaggcggcgcagcgataacgtggttctgttgaatttcaacaccaacatgaccgttcagatttccaattccggttaacagaaaggattatgggccaggtactcgatttgtacgaaaaactgaccggcgttgttttgccttacgccggttcctccgcaccctccggtttcctgctgtgcagcggccaggtggtcaacagggcggattatccgaacctgttttcggtcatcggcacgacgtacaacgtcagcggcgagacggccgcgcaattccgtttgcctgaccttcgcggccgcgtcccggccggcgtcgacaacatgggcggcaccgcagcgtcgcgcttgacgacggcgggcagcggcctgaatggcgccacgctcggcgcggccggtggcggtgaaacgcacacgctgaccacggcgcagatgccgcagcacaatcacggcgtcaacgatccaggccacatccatagcgcaaacgttcgtctcggtacttcaacgtccggcggaacgtacccgtacggcggcagcgccgacaacaacacgtatttgaacaacaccggaaattcaacgactggcatctcgatccagaacaacggttcgggccaggcacaccccaacgtgcagccaacgctggtgatgaactacattattaaaacatgaacgaaagcattcgcgttacggcggcctgggccgctggattcttcgaaggcgaagggaccgtccgatttaacaggagccgccacggcggacctggcacaatcgggcttcagatcgtgaacacagaccttgcgatgcttgcgcgctttcacgaagcgacgcgttgtgtcggcaccctttccgggccgcgcccgtgtcgtggcttggggaggaagccggtctatacgtggtatgtgaataggttcgaaggcgtgcagttcgtcgtcgcgatgctgtgggaattcctgtcggaacgcaggcggtcgcgcatcaccgaacattggcgaatcccgcaggcgcagcgccgcaagacctaagcggaaattccgcaagtggaatggccgcgttcgtgcggccatcatgcgcacagaaccgtatcacccaccggacccatcaaacatggcaaccgatttcctgcacggcgtcgaggtcgtcaccatcgacgacgggtcgcgaccgatccagaccgcaagttccagcatcatcggcattgtcggcaccgcgccgcgtgccgacgacgaagcattccccctcaacgttccggtgatggtggccggctcgcgcgcgctggcggcgaagctgcttgccaacgcagccggaagcgacggcgacggcacgctgccggaagcgatggacagcattttcgaccagaccggcgccgcggtgatcgtcgtgcgcgtcgcggagggcgccagcgattccgaaaccctggcgaacgtgctcggcggcgtcaacgccgtgaccggcgcatatgagggcgtgcacgctcttctggccgccaagtccatcaccggcttcaagccgcgcatcctgatcgcaccggggttcacgcaccagcgcgtccagggcggcatcacgggcgtgaccctgagcaaccagggcgctggctacagcgccgcgcctgccgtctcgttcacgggcggcggtggcactggcgcgatggcgattgcggttctcggcaccggggcgaacgctggcaaggttgtcgcgatcaacatcaccaacgccggaagcggctacaccagcgccccgaccgtcgtcctcactggcggcacgccgacgaccgcggccgtcgcgaccgcggcgttcggcaacaccgcgaacgccgtcgtcgcggaactgaccggcatcgccgaacgcctgcgcgccgtcatcgtgcaggacggcccgagcaccaccgacgccgccgcgatttcgaccgcgggcgactccggcagcaagcgcgtttacctggtggacccgcgcgtcctcaagaccgacagcgccacgggcaattccatcgcggcgtattcgtccgccgtggtcgccggcctgatcgccaagaccgacaacgaaatcggctggtgggcgtcgccgtcgaacaaggaaatcaatggcatcatcggcaccgaacgcgcggtggacttcgccatgggcgacgtaaacagccgcgcaaacctgctgaacgccgagaacgtcgcgacgatcatccgcgaatcgggtttccggctgtggggcaatcgcacgctgtcgagcgatccgaagtggcagttcctgtgcgtcgtgcgcaccgccgacatcatcgccgacagcttgcaggatgcacacctgtgggccgtggatcgcggcatcacgaaaaactacgtcgaggacgtgcgcgagggcgtcgcagcgttcctgcgcgacctgaagtctgctggcgcgatcttgggcggcgaatgctggctggacccggacctgaacagcaattcggcgatccagaacgggcatgtttactgggatttcgacttcacccccgtctacccggccgagcggctgaccttccgttcgcacctggtcgacaactacatcaccgagattttctgacatggccgcagcgcgcaacgttcgcaagaatatcaacctgtacgtggacggccgcgggcaggccgggcaaatcagcgattacaacgcgccgaagctgacgctcaagaccgaggaatatcgggcgggcggcatgcacgggccgctggaattgaccatggggcacgaaaagctggaatgcgatttctcgctgatttcgtacgacccggatgtcatcgccgggtacggtgtcgccgagggttcgcaaatccagttcactgcgcgccaggccatggagtcgtacgacggcgccgttaccaccctggtgcacaacatgcgcggcaagatcaaggaaatcgaccccggcaccagcaagcccggcgaggttccgacgctcaagatcaccgtcgccctgtcgtactacaaggaaaccaacggcgtgcgcgtcatccacgaaatcgatgtcgagaacatggtgttcgtgaaaaacggcatcgacgttctggccccggttcgcaacgcgctgggcatctaagcgacgccgcagcgcaatcaagtcgcgaggggttaaacccctcgccttttacatcaaccacggaaaattcagaaatgagcgaaaagagctacctctctgccagtggcgacaaggtcgtcatcaccctggcgcgaccggcaacgttcgacggcgcgcagcgatccacgctgacgatgcgcgaaccgctggtgcgcgacctggaacagtcgcagagtgcggcgtcgagcgacgcggcgcgcgaaatccaactgttcgcgaatctgctggaagtcagtgcagacgacctccgcggcctgggcctgcgtgactacaagcggcttcaggaagcctacgagcgtttttccgactgacgcgcgattacatccgggccggtgtgttggcgttggcgtcgcacaccggttgggctgaagccgaaatcatggctttccccgcgtcgaaattcatttggtacttggaaggtctcccgaaggaaactgattaatggcgtctaagaccctcaaggccagcgtactaatcggaggctcggtttcgtcgagcctccgcgctgcgttagggtcgacgcaagacggtctgaagaagatcggccaagcgatttctgatgtcgagcgcaagcagcgcctgatggggcagtcgatccaggtattcggccgccaggggaagaacgtcgatggcctgcgccgtcagtatgaccagcttacgcaggcggccgaacgcctgcgcgcggcacagacccgcctcgccgctgcgcagcgcgcggtaaacagcaacatggagcgccgcaaggcgcttgaaggcaagatgactggcgcagtcggggccgctgtcgctaccggcttcgccatcggaaagccagtgctgaacgccgctgcgttcgcgcgcgaaaaccgcctgatcggcaacacagcgaacatgagccgcgaggaagtcgccgcgcttggcgcgacgatcctgcgcgagtcgcgcgtgacgaaccagggcgccaacgagctacagaaggcaatcggcttcctggtcgcggccggtctggacgtgaagactgcggaagctagcatccgcactattggccgcaccaccaccgcggccggcgccgatatcgaagacctttccaaggcatcgtttaccctcatcgacgcactgaagatcaagcccgatggcttgcagggcgcgctcgatatgctggcgctcgccggcaaggaaggcaacgtcgagctaaaggacatggcacgtcagttgcccgtgctcggcgcgtcgttcgtcgcgctgaagatgggcggcaccgaggccgtggctacgatgggcgcggcgctggaaatcgcgcgcaagggtgcaaaggacgccgacgaagccgcgaacaacatgcagaatttcatggtgaaaatgatgtcacctgaaactttgaagaaggcgcagaagaatttcggaatcgacctatacgcgattatcaccaacgcgcagaagaagggggcaaatccctttgaggctgcgatgcaggcggtgatgaaggcgaccggcggcgatcaaaagaaaatcggcgaactgttccaggacatgcaggtgcaggcgttcttgcgcccgatgatccagaattgggacgaatatacgcggatcaagaataaggcgctgaaggaggcggcgggcaccactgatcgcgatttcgcgctgatgatggagcaggaagccgagcagatgaaagcggcgaagatcgccgccgacaacatggcgaagacctatggaaaggtgttgctccccgccatcggtgacgctgccgggaaattcgctgtcgtgttcgacaagatgacggctttcatcgacgcgcacccgaaacttgtggtcggcgcaacgaaggcagtcgccggcatcgtcggcttgcgcgtggccgcgctcggcctgggttacgcgtggacgttcgttaaggggccgattctccaagtgtcggcgctgatcgcgcgcttccgcgctggtggcctggtggcatccatgggccgcctcgcgcccctggcgctgcgcgttgccggcgcgttccgatgggttgccatggcggcgggggcaatcggcggcggcccaattgcggccgctgtgggcgccctggtggttggtgcagttgtcgtgcggaagtattgggagccgatcaaggcgtttttcggcggcctgtgggaaggattcagcgcagcgcttacgcccgcgatgcaaggtcttttctctgcgctcacggaactgaggccggcatgggatgcggtgtccaccgcaatcggccaggcgtgggactggttcgtgaagctgatcgaccccgtttccgccagcaaggaagaactcggccgcgccgcgcaggtcgggcgcgtcttcggcatcctgatcgcgaacagcatccgtattaccatcaacgtgctgtcgaccgtaatccgcacggtcgtcactgtcgggaccgccttcaacgccgtttcccaaaccatcgtcaccgcgtggacggatgcgtggacccgaattcgcggcgtcgtcgaaaccgctgtcggatttatcctcaaggcgatggcgcccgtcaccacggcgatgtcgtggatttccgacaaggcgaatatcggggcgaacgtgtcgggctggtttcgcgacacggggcgatccgcgaacgatcctgttgcagcggccgcggccactggtggcaacgtcccggcgctgccacaggtatcgcagcgtgcgcgtagcgcgacgccgaccgtcaatcagcaaaacgtgtaccatatcgtgcagcagcccggcgaatccgccgaagcgctcgcgcgcaggattagcgaggcgcagcgacgcgaggctgccgtacgcgaacgcggatcactggcggacaagcaatgagttttatcgataacctgcgccgggacatcgcgaaccggctaaacaaagtcctgaccagcaggacgggcaacgcgcccgttatgatgatgctcggcgggttcaagttctccgttcgcacagcggcggcgcatgaggtttcgcgccgccgcggtttccgctgggcagcgcaagagcgtttcgggaacgtggatgcgctgcaattcaccgggtacaatgaggaagtttggaatttcgcatgcgtggtttatcccgactggcaagggataaagtcgactgacgaaatcatcgagattgcgccggagaatcgcccacttaagttgatttccgcgagcggcgatatcatcgggaaattcgtcattgtcggcatcgaagagacgggttcgtatttcaagaccgatggcacgccgcgcaaaatcgaattcaacctgaccatccgggcttacgaatgatggagtacatcacaaagcaacgcgacgtactggacgacatcgtcagccgtcaatatggaaacggcgcatggagcgtcgtgcaggccgtgctcgccgccaaccctggccttgcggataacggccccgttctcccggccggcattactatcgtcctgccagtcatcaacaccccgtcgaccgaggtcaaggcggtgtcgctgtgggattgacatacctcccgcagttccgcgtattcgcgaacagcagcgaaatcacggaagccatcgcggaccgcctgcgcgcgctgcgcataacggatgaggccggcacgacttcggacatgctggaaatcctgcttgccgacaacgacccatccgcaccgattgccatccctccgactggcggcgagcttgaggtttttttagggtacaacggcgcgctgaagcgcatgggcctgttcatctgcgacgaaatcgagttgagcggttaccctggcgaaatgtccatccgcgcgcgcgctgcgccgtatgaggaaagcaaggaaggcaagaccgacctacagacgcagaaaacgcgcagttggaagaaggacaccaccatcgggtcgatggtgaagaagatcgcaggcgagcacgggatgacggcgtcagtgtcgccagacctcgccgcgatcaagctgccgcacgaagaccagtcgagcgaaagcgatatgaacctactgctgcgcctggcgaagcgttacgacgccatcgcgaagccagccggtggaaagctgctgttcgtcaaacgcggcgactccaagacggcgagcggcgcggatatgccggcgtttacgctgacgcccgacatcacgacggatttccgcgtcgtcatggcgacgcgagacagcgccgggaccgttgtcgcttactaccgcgacacgggcatggcgaagcgcaaacaggtcaaggtcggcaatggcgaacccgtgcgcaggctgcgaatggggtatcgcgaccaggctagtgcgcttgaggctgcgaaggcggaacagcgcatgcgcgcgcggggggagcacaaaatcagcgtcaacacgccaggcgacccgaccatcgccgcggaagcgatgatgacgatgcagggctaccgcgacggcgtggatggcgaatggctggtgacgcgcgtcgaacactacttcggcacggcaaccggctatcgctgcaccatcgagggcgagattccgaacaaggacaaggacgtgtcggacgccgacagcgatgtcgaggacgaagaccaggacggcaccgaggaaggcggctgaacgtgaagcggcgtgcgaaatcgtgtggaaaagttagcggccgtgttctcggttgaaagtgcacccaaaggtgcacccacgctgttttttgaggttcgctaaaatcgccgtaagcagttgattttgttgatggagcgggtgaagggaatcgaaccctcgtattcagcttggaaggctgtccccacgttataatgcacgttcacggtgcgcaatccggcgtcacgttaagccattgattcacaacactgaattgacggctgaataggaatgcgcaagtgatttcaaagccgcagccgcggcgatgatccgaccccgaaagtgcacccagggacacccatgcttacgccttcgaagattgatgccgctatcaagaaatgcaccagcgaaacggtgctgaacgacggttctgccggccgcggctccggcagcctgacgctgcgaatccgcgtcggaaccaggatgaaatcggcgacgtggatcgccacgtggaagcgtggcacgaagcgcggaaagaagccgctcggccgatacccgacgatgacgcttgcgcaggcgcgcgaggaattcaaggtcgtgagcgcacagattgccgccggcaagaacccgcatcgccaggccgtgctagcgacgatgcgaccgaccgtcgaggcgttgtttacttcctacgtcgcgcacctgaaagcgcgcagcgcgcgcgctgccggacacatcgagcacgtgctgttgctgggcaagcacaacgcagccgacgcgcttggccgcgacaccctggtggctgacgtgacgccgaccgacatccgcgcaccgctggcggccaccgcgaagcgtggcgccctgcgcacggccgacatcctgcgcacatacatgtccagcgcattcggctggggactgaagtcggcgaacgactacaccaccgaagacgcgttcgactggggtatcacggcgaaccctgtcgcggccgtgccgaaggacgccagagcgaacaagcgtcgcgaccgcaatctgtcgccggccgagttgcgcacgttctggcgcggcatcaacggcggcccatctggcgacgcaatacggctgatgatcctgtgcggccagcgagtgcaagagacgatccgcgtcgacggttgcgaaatcgaccttgaccgcgaactgtggatgatgccggccgagaagacgaagggcggcgagcacccgcacacgatcccgctgccgcgcggtgctgtcgagattttccgcgttctgaaggagcttcacggcgacggcccgctgtttcccgcgcgcaccgggtcgaagcgcgaccgcatgggcatgctggccgtgagccactctgtcgcgtcgatgacgtgcgtgcgtgatttccaggcgcgcgacgtgcgccgaacgtggaagtctcgcgcgcacgacgccggcatcgaccgctttacgcgcgacttgatccagcagcacgcgcgcaacgacacggggtcgctgcactacgaccgcgccgactaccttccgcagatgcgtgaagcgatggtgaagtggcagtcatggctagatgaacacatcattaatgaaccattgagttcagttgacgatgatattcgtaaagccgcatgattaaccaatggcagctacgcagtagatgagtggcgagccgggacgatcaagcagaagtaacgcaggcttaaaacttcagggcggcaatatgctacgcggttaggccattgcagcgccagaaacggcctaaacatcgcccgccggggccaaacgtcgcgcggagagagaccgacaatccacggggatgcaaggattccccgatctaaatttaacgccagcacccgcggactagcggggtcgtttgcccgatagatcgctggaaggatcgggaccgaagtcggcacaggaaataagtggcgttggtatacgtcaagcagccgataaacacccgcgtgcctaccggcgatacggtggttctaattcgggccggcgcattgcgccacccacaagtgcatagggtccgtggcgagcgttgcgccatcaacgacggatgaccagggcggtggccctcactcccaccgccgataagcaagggggacactccggagagacggggcgcggaacccaaggggtcgcgtaataaatgcttggtggccgtgaaacgccctgcccgcgctcagctaatagcgcgcgacaccccggaaagacggggattcatagcggttcggcttttgcgtgtagctcatcggttagagcgcgcctaaatccgtccgatacggatgcagcaatgggcgaggtcgtcggttcgaatccctcttcgctaaggccgcaccgctatggatcggaatgcgcaggctgatgcgtaagggtttaaggcgctgttatggcgctccgcgggttagcgtgtaagcgcccgtatgccgggttcagcgccggtacgatccaccacatgcacctgtcgtctagcggtcaggatacgggattttcacttccgttacgcgggttcgaatcccgccaggtgtgccatgtacccgctctgcgaaagcatcgggcaaaagagtgtggcggccatgatgcgaaccatggcaatatctatcgacgccgcattcgctgggacgatggggacgcagcccgtaagccagcaactaacaccgaagcgccgaagtaacgccgagcttggactaaagcgggacagccggaaagacggcgacgtatcagggattttgtagcccgatgacgcgtgacagaaccccgcttcggcggggtttctttttacccgaacaattcgccgcctgcgcctggaaggtgagcgacccactcgcctggctcggtcatcatcatgcgatcctgcttgacgctgttcaaccgcgccgggatcacttgcaaattccaccacgcatgcttcccgccgcgcacaagcggcgtcatgtggtcgacggaccaggggtagccggtcatcgctgcgcgacgcttgcacgcggcttccgcttcggccaagacgaacgaatcgaagtcgccgaagtccggcaccgcgccgccctgtagcttcagtttgcgacgtgcccaccccgacgacaggttcaccagcggccgagcgccatcgagcgcgaaggcgaacaggtcatccccgttcgccaggcgcttgcgcagttgccgttcggtcctggcgttcacgccgcgacatccatcgccccatgctgcgggcagtgtggcgggccgacatccagccacttcgacgtgacgcgcactgtgtacccgcattcgccgcacgcagccttgtgcaggcgcgtcgtctgcttcggcggccggttgctttccggctcgcccgcctcgccttctggcgtgccctgcggcgcttcctgcggcaccaccccgccaccctcgcgcttcaccagtttctggcgcgtctgcgcctggcgcacgaccagcggcgagtgcgggatgtcgccaagcttgtcgatgagtggctgaacccacgcgatgaattccgggccaggcttcgaacaggtgaacgggcgttcgaaccccatggccttcatcatcacggcgaacttgcccttatgaccttcgcgcaggccgaccgcggcgtggttgagttcgtgcgccagaatcgccgagattgccatcgacgacgcttccgccgggtgaattaggatcgtgtaacgctcatccgctgtcgtgcgcttatcccagcactcgccgttcgcgctgccgcctatcccctgcgacgtgaacccgatggacacacggaacgccggcagcgggtggccgagttgttcgaaccgcggcgacatcaaggccgccatttcgttaagccacgtttccctgttcatattgtttaaacggattgaatgcggatggggtgaagaaaaccccgctctgggcggggtgatcttcgttcggccgtgttcgcgttacgacttcaggcaggcggcgcgggtgttgatgagggtgccgtcgtcgagcttcaccgaaaaccacttgccgcggagaccttcgcgaacatcggtgatcttgccgctggcgtacttggtgcccaagacggttttcgccttgacggtctggcctttcttgaaatcggacatgttgttcagttttgtagttggcgggttatcccgcccgtgaattatccatcacaaggcgggagtaatgcaatacccttttgcgaaaatcagaaagggatatcgtcgtcggcgaagtcgtccatcggcggcgggttgcgagccggcggctgccgctgcgtgcgcggcgcttcctggcgctgcgtgcgctcgccaccctggcgctgctggctgtcgccttcgcgcttggcgccgagcatcttcatttcgctggcgacgatgtcggtcgtgtagtgcgtcacgtcgcccttttcatagctgccgtacgacagctttccctcgatatagacctgcgaccccttgcgcaggtattcgcccgcgatttcgccaagcttgttccacagcttgacgcggtgccactcggtcttttcctgcgggttgccgtcgcgatccttccacctctcggtcgtcgcgatgctgatggtggtgacgcaagcgccggattgcgtgtacttcacatccgggtcgttgccgaggttgccgataagctgaactttgttgagcatggctgctgtagttacctgttagtcgtgtagcgttgatgttgttcggcgcacgcagggccgcagaacagccgggccgtatcgctttcgtcgaattcgttttcacacaacggattgtagcagtaaccccgcgcgacgatgcgcggggtacttgctgcaatctgctgctgaacctgtagtgcctgcgcgaggttcttcgcgtcccgttcttgtgcctggtcgaacacgtccatttctatgcggccgccttggtggtttggttggtggacttcgcttcgtacgcgacaacagattccagcgggtatcgaacgcttcggccgaacttcgtaaacgccgggccaatccccttgctgcgccagttcgacagcgtgcccgtcgttactgcgtttttccacctggcgaccagttccgcggccgtcaaataattttcgttgggcatgtccgttcctttcctggcttacccgttgtcgttcataacttcgttgttcaggtcggccagttcctggccgccgggcttcgcttcggcgcgcatcttgtcgaacgcttcggcggcgaccttcagcgggccgatgctgccatcgccggaaagcgccttctgaactttcttcggcagcgcgcggaatgccgcttccagcgctgcaagacccttttcgctggtggtcttcagcgtggctcgcgccgcttcgacttccgggtccagccttgcgccgccgtcgacccagtcgcgcagtgcctttccttccttcgcgccgatatagccttcgccgcggccgaggatcgattgcaggtccgcggggcacttcatcacgtcctgctgcttgccttcggagtgcatgagaagcgaagcggtcatttcgaacatgaaattcttctcgcacaccggcataatgccgagcgggatcacttcggttttgccgcccaccttctgaatctgcaccttctcacgagcgcggatgcagaaaatgatatgcatgttgcactgaagcgcggtgttcatgaacgccttgtgctcgcgcttcgccgtcgcccagtcgggcatgcgcgggttctgcgcatgcgcgatttcctcgcagccgcccgtgccttcccattcgtgcgtcgcgctgtcgatcaccagcacttcgacgccggcacgctggaattccaggatcgcatcgacgtagcgtttcggcgaaaacggaggctccaagtcgccaaccaggaacgggtgcacgacgccgtcgctgtcgaccaacgtattcgcgtacagcgaaccgcggcggttttcagtgtcgagaagcccgactttcttggaatcgtaattcgccagaccccacgccacttgcagcgccgtgtacgtcttgccgctgccgctgatgccggacaggcccaacaccaggcgagcaccctcgcgcttcgcctcacggatattcagaacgcccatagttgaaatagtctctctgctgtttactcgttcgcggcggaagcggccgcgcgctggaattgccacgcgggcaatttgatttgacgaatcgcagggctgtagccgggccactcgccggattgctcgcacttcgtgtaccgtgccaggtcgttcacccactgctgccggccgagtgcgcggctttcgtcgtccagccggtacacggcaacacctttcgcctgcccgtcgacgacgcacgcggttttctccaccgcgatgaagacgaacgcacgcggcggggcgaagtcttcgaagccgccgcactggcgcagcgcttcggtgccgccatgcagatagaagtcgtcctgcacgtgatacgcccacttcgcgatgctgcgcgcgaattcctcttcgctggcgtcttcggtggacttcaggtcgatgagaattccatctttgcgccacttgtcggggcggatgcggcacagttgctgcccgatgatgtcccgcgtgatcgggtctcggatttcctgcatccagtacgcggacagttcggattcgccgggggcggaaagcagcttcgacgccgccgggtgcgccatgatcgcgtcgcgcatattgcgcaactgttcgaactgttccgcggtcaggatcgtgcgatgcccgttgttgcgcatccactcgccttgcacgtcgctccacagcgtgacctgcacgccgttcgcgcgcaggatttccgccaggtcgtggcgcgagccgctgacaggtagcaggccggcgcgcgtttcgttcgcatcctcaatgatggccttcaggtctgcgcctttcatcgcattgagcaagtctgcgtgatatctgccatgcaactcggacgagatgcgcgcaacaagatcggccttgctgccgctggtcggaagcttcgccagacggctttcgttgagcttcgccaccatcgcgaccagcgcttcgcgatcatcgattgcttctggaacgtcgctgcgctgaagcgcgagcgtgtaggtcttcgcgaacaactccggttcgagcacgatcatatgcaatgccgtgccgatgaactgcgccgcggtcggcgcgcgtgcgttgtcgttggctgccgtcaccacggcgcgatagtgggcgggtgacttgcggatgaggtcgagacctgatttcgaaatgccggggccgtgatgatacgcatcattcgacagcccccggtaaacaccgggttccatagtgactcctggttttgtgtgatgagcgcgagtgatcgcgaatgaattgtaacggctacgttgacgccgtgtcaaagagtgcgcggcacatacgcattcgcgcgaccctgaatgaatttatgtagatgaacatacgtctttttcccgaagcgtgtatgtagatgatgcagcacgcgcgatgagtcaatcagcgtcgcgtcagcgtcgcgtgacacccgcgttaatcgggtacaatcggaaaccactacagtgaaaggggatgaacgaagatgagcgttgtcgctctccgcgattatcaacaggacatgattgcgcgtcttcgtgtcgcactcaaagaccatcgccgcgtgctgctgcaagcgccaaccggatcgggaaagacagttctagcgtcttacatcgccgcagagacttcgcagcgcgggcagctaacttacttcaactgccatcgcgtcgagttgcttcgcggaacctcaaacacgttccgcaagtacgacattccgcacggcttcatcgcggccgacatgccgcaatcaagtgcactagtgaacatttgcagcatcgacacgctgaagggtcggcttgcgctgaccgccgagccgcgtgtgtgcatttgggacgaagcgcatcaccttggcgccgatgggtggacggcgatcatggaagcgtggccgaacgcgctgcatatcggccttagcgctacgccgtggcgcctggacggcagcggattggacgaacagttcgatagcctggtgccaggcccaacaactgcatggctcatggaacaaggccacctgtcgcaatacgaaatcttcgcgccgttcgcaccgaacatgaagggcgcgcgcaaggcccgtacaaatacgggagggacggatttcactaagaaagacgcatcggcgcggatggatatcccgaagcgtaccggtgacatcatcaagcattggcggctgcacgcggaaggcaagcgcaccatcgggttcgcggtcaacgtcgcagactcgctcatgctggtggagcgcttcaacgccgccggcatccccgctgcgcacctggacgcgaagacaccgaagggcgagcgcaagcggatcattcagggtttcgtcgacggaactatcctgatcctgttcaacgtcgctctgtttgatgaggggttcgacctggcggcaatcgctggcgtcgacgacctcactattgactgtctcattgatgccgctccgaccatgtcgctgtcgcgcgtattgcaacgctggggccgcgtgcttaggcgcaagccatacccggcaatcatccttgaccacgccggcaacagcgcgcgccacggcttccccgatgatgaccgcgtgtggacgctggaaggtaaggacaagggcggcgcagcgaacgacaacgggccgccgccgcccgtcacgtgcacggggtgctttcgccagatcaagcgtcccgttccggagtgctgcccgtcgtgcgggaaacgcatgttggccgaattgaaagagattgaggccgtcgagggcgaactaaagaagatcaccgcggaagagaaggccgccgccaggaagcagcggcagcaggaagaacgtgacgcgcaatccctagcggagcttgtcgcgctaggccaccgccgcggctaccccaacgcgcaggcttgggcgtttaaacgatggcaggcaacactcgcgcgcaaaaaggcggcgtgaacacttgcattccgttctgtgaataccttacgattcgctcacgggttgtacaccgtgacctcaactcactgaacgggaaccaagatgaacgagaatgcgccgtcgtttaagcagatggtgaaggacgggaccgcgaagcgggccgattcgctgaaattcaacatcgacgacatccacgaagaacctgggttcaaccttcgccgtgagggcgaagacctggaagccagcatcgacgcactggccgcgcacatcctgggtggcggaatggtgccgcccctggaagtgcgcccgcgcatcggtggcggcgtgttcgtcgtcgacggccatcgccgccgccgcgcatacctgaagatcgccgacaagctgcgcgacgactacggtcaactgtggattccggtggtgcagttcaccggaaacgatgtcgaccgcgtcgcgcgcgtcatcaccagcgccgaggggcgcgcgctgtcgcagttggaagttgccgaaggttacaagcggctcgccgcgctcggcaagtcgcccgagtggatcgcgcagaaggtcggtaagacgcgccagcacgtcgaccaactgctgatcctcgcgaacgccaatagcgacgtgcagcagcaggtgcaggccggcaccatttccgcgaccacggccatcgatgcggtgcgcaagcacggcgaggacgccggcaaggttatcgccgaggaagtcagcaaggccaaggccgccggcaagacgaaggcgacgaacgccaccatcaagggcaagccgttgccgcgcaagctgtgcgacgacgcgttcgcgaccctggcgacgctgcacaagtcgctgacgccggccgaccacgaaacgctcgcgacgatgaacctttcgcagtcgccgcgcatcgaacttccggccgacatcgtgttcgaactgctggaaatccaccgcgaggccatcgagcacgccgagaagcaggccaaggccgtgcgtgatgctcaggccgcgcagaaccaggcagaactcgcgtgagccggccgcggtctgtcatggtgtacgggccgcaaggatgcgggaaaacgatcaacgccgagcgtatgcgctcggccttcggtatggggaaaatcgtcgatgactggcgccgcggcgaccagtttccgctttatggcgcgctgatcctgaccagcgattacaccggctaccacgcagcggcgggcatggtcgagcgcatgacgttcgacacggccatgacggcggcttactcatgagcggccgccaccccatgacctcgcttgcgaggatggcaatcaccctggcgttggcgtacgtcgtcgccatcgcttccgcaatcgcttacctgtggtggccgcgatgatcgaccgccgtttggaacacgcgatccaaaacgaaatccgcaatgcgctggtggatgagtgccacctgttccgcgctaacgtgggtgtcggatttcagggcacggggcggccgttcaagaccccacatccgatcaccgtcaacatgtcccccggtgacgtgctgctgcggcaggcgcggccgttcgacaccggattgccgccaggcttcgccgacacattcgggtgggtgccggtggtcatcacgcccgacatggtggggcagacgttcgccatgttcatcgggttggaaatcaaatcgcagacgggtgcggtgcgcgacaatcaaatcgcgttcgtcaatgcggtgaacagggcgggcgggcgcgcaggttttgcgcgatccgtcgaagatgcacgcgacatcattcggggcgaacatgcacgcatcaaccttcaacagggagcgacgccggatcgaacggcagtcgcggggaagcgcagccgctgagcgccgcgcattgcagcagttggtgcgacgcgttcgcgccatttcgatcatcgagggcggacgcatcatcgggtatcgcatgcgtgacggcagcgtcgcttgccgcaaggttcgatacctgtcgatcaccgatgcggttaacgacatggcgcgcatcggcgcgcttccgaacaagggccacaagccgattcgtgcttacccatgcccatggtgtcacggctaccacctgacttcgcgtcctgcgtgatcgcgcgttaacaacgattatttcaggcgatattcacaactgagaacgccgcgcggtacaattcgcgcggcgatcatttcggcacgacatgaacacacgaaccaaacaacttgacgcgttgatgaaagagcacggacttaccgcgcgccaggttggcgaaatgatcggccgcactgcgcacacggtccgcgtctggcgcagtaagtatgagcaccgcgtcatccctgagcacaccctgtcgcacctgctggtgaagatcgcagaacgcgcgggcggtgctgcgtgacgcaatacgacgaaaacaggatcattgacgaattcctggcggccatggccgccgatggaattcgcccgatgttcaagcctggccagtctgtcgaattcggactgacgcggtcggggcgcccccaccgcttccacgtcgacggtgacagcaagggcaccgtaaacggctggtatgtgctcttcggcgacggcatcccggccggcgaatacggatcgtggaaatcgaacgtccgcaacacctggtgcgcgaagaatcaccaggaactgaccgacgacgaaaaacagcagatcgccgcgcgcatggccgaaaccaaggctgcacgcgaggcagagcaacgcgagcgcgagggcaacgcagcgcgcgatgcgaacatgctgtggaacaacgccgagccggccgacgactcgcacccgtacctgcaacgcaagggcgtgcgctcctatgggctgcgcgcggggcactggcgaaaggaagacgacaccggtcgcgtgtggctggatgtccctggcgcgctgcttgtgccgattatgctggtaagcggcaaaatcgtttcactgcaaggcatctttccgagcaaggcgaacgcggcgaaccgcgataaagacttcctgaaggacggccgcaagcgcggcggtttcttcctgatcggcacgccgccgcatggcgatggcgtcatcgtcgtgtgcgagggttacgcaaccggcgccacgatcaacgacgctacaggctggtgcgtcgctgtggcgttcgacgccggcaacctggtcgcagtcgccgaggatcttcgggccacgctgccgaacgcgtcgttcgtcatcgccgcggataacgaccgctggtcgcgcatgggcgacatcgagaaccccggcgttcacttcgccgagcgcgcggcgttcgctgtgcgcggtcgcctggtggtgcctgagttcgccgacctggacgacaggccgaccgacttcaacgaccttcagcagcgcgagggcatcgacgttgtgcagcggcaactcatgccgccagtgccggcgacgatcacgcccgacgaaccactgcccgcgttcgatccgcgcagcgtcgacggttacacgccgttcccgatggtcgacggaaaggggcggccgctcgccaccatcgagaacgtggccgagttgatgcgccgcgcgaacatcactgttcgatacaacgtgatttctaaggacttggaaatccgcattcccggcgcggtcaacaccgtggacaacgccggcaacgcgtcgatgaatcgcgttgtgtcgctgtgcgagacaatcggatttccgaccaagcacctggaaagctacatgctcaacgtcggtgacgataacccttacaacccagtcgcaacatggatcacgtcgaagccgtgggatggtcgcagccgactgaaagagtttttcgacaccgtcaccgccaagtcggatcgcaccatcccgtcaaacggcgcgagcctgaaagagacgttgatgaggaagtggcttatctcggcaatcgccgcatcgtttaccccgtctggcgtcgtggcgcgtggcgtgctcacattccagtcagaacagaacctgggtaaaacactgtgggtgaagcgacttgcgccgcccgagttgggcgtgatcgctgatggcctgatccttaacccgtccgataaggacagcatcatggggtgcgtgtcgcactggatcgttgaacttggcgaagtcgacgcgacgttccgtaaagccgacatcgcagcgctgaagggtttcatttcgaaggagcgcgacaacctgcgccggccgtatgcgcgcactgaatcgaagtacccgcgccgcaccgtatttttcgcgagcgtcaacgatgagcaattcctgcacgacccgaccggaaacacgcggtggtggacgattgccgtcgaggcgctgaacaatcagcacaccatagacacgcaacagctttgggccgaagtgcttacgctgtttcaggccggcgaaacgtggcatctgacgcgcgaggaattgaccgtgctgaacgaccacaacgtcgaccacgaaagcatcaaccccgtgcatgagcggatcggccgcgcgttcgcgtggggcgagccgaagacgctgtggcagcgcccgatgcgcgcgacggaaatctgccaggccgccggcatcgagaacccgacgaagcttgatgtcaacgcggcggctgcgttcgtgacgaagcgctacggcgtcgacacgaagaagcacggcaaggaccggcaaaaggtgtggatgatgccagcggctcacggcgcccgcagcgacgttgcggacgacggggggccgttctgatggtcgttaccctcatcgatggccgcgaggtatccagcgacagcgaggaatggcgccacgaatgcgaggcgcgcgctgtgtgcaagatgcgaggttacattcacaccgacaaggccaccggccggcgctcgcccgtcagcgcgaagtcagtgcggcagcgatacatgatcgccgtcgcagaaaagcgcgggcagccggcagcagatgcgctgcgagacctggtgttgcgcatatggaacgatgagtttcgcgaacaggcgtagcattacatatgtaacgcactcacaatacgcccacaccttcaccggacactgacatgaacgaccttcgcaaccacatcatcaacgcgacgccgaagactccgcgccgggtccgcgccgcaacggtcctgctgtgggtcgccgccgcgttcgtgtggggagccgtcgccggccgcgccagcgccgcggaagcgctgttcgaagcgaccagtcaggctggcgagacgaaggccgcgttcctgcaccgggtcggcgcgctgatgcgccagtggtcggacggttcgacgctggaagcctgcggcgtgatcgccaccgatggcgagcggttcggcgttgtcgtgaagacaagcggctcgcacctggcctgcgccagtggcagcaaggccgtccccgccggcatgcagtccacgggcgagacgatccacacgcatggcaccgacaggccgttcgtcgtcaacgacgccgacgccgagttcaccgggctgcgcaagggttcgccgatccacggccagcgcctggatcgcttcagccgaaccgactacgcggagccgggttacctggcggcgccgggtggtgaactgttttaccaggacggcaagggtacgcagcgcgctgttgcgctgtaatcatcacgggcgaaagcccataaccgaggaaaggacgtgaccgaatacgagattggcgacagggttcgctgcaaaaatgcgggtcaagtggacatcgaagtcggaatacgggacggcgctgtgggtgtcgtgaaggaagtgagcaacctcgcgttcgtaaagttcgacggcatcacgatcaatcacgccaccgaaaacaaccgcggcggcgcgtgggcaatgtacgattatcagttggaacgggtggcttctgaagtcccgccgatgccttttttcgtcaagcacaaggattccggcaaggaataccggatcgatatcgaaaacggcaatccaatgctgacaaacgttcgcagcggggagaagttcaaaggatacagcgaggaagtaattgcggacatcattagcaacggcttttgggtcgtcgtcaacgacacaaccccagccgtcgacccggccactacggcatcgctggaagttcagcgactgctgcgcgagcggtccgcagcgttggcggcgcgcgaggccgcacaggctgttctggacaaggccgaggaagcctatcgcaacatcggcaaagaactgaacaaggcaaggggcgaactggaccgtgtcaaccacgaagcggccggcgtgaagttcgacccgatcccgtacggcttcccgcagtgaacaagggcatcggcgcggcgtatcgcgctcagttcaggaacgggacgcgcatgccgacgcgatacccgtgccgatgctctgtgtgtggccgccggcacacgctgcgcaagcagcctggcgagtaccgaagcgagccgcggtgtaagtcgaaatgcagcggcgcaacgctgcgcatcgactggttcaggatggcggcagagtggcacgccaggccgtgccgctgcgacgaatacagtttcccgcacgcacacggccgcgggttctgcaaacacaatcaggcggtcacgctggatgatcgccgtcaacgatatgaggaagggcgatggagttgaacgcagcaaatcaggcgcaacatgatgcgattgtggcggtgatccgcgagcgagcgcgccaggtcgaaacggggcgcacgccggagcgcgacgcgctgtatcaccagtgcgaactttcgcgcgctgcatcggcgtatgcgaccccggccggctggcgacgccacaacggcgacggcgttcccaccatgtggccgtggcatccgtccacgttccgcgcggagccgcagaccaccgaaggccggctgcgcgaactggcgaaggccggcgcgctgatcctggcggaaatggaacgcctcatcgcgaaggctggtgtgtgatgagggagtgcaaggggtgccgcgagacgaagccgttttctgagttctcgccccacaaaggcggtcgcgatggcctggcgccccgctgcaagcagtgccgcaacacgcgcgcgcaggaggtgtgcaaggcaatcagcatcgtgaccggaaagcggaaatacgtccgcaagaagccgcgcatctaccctgacggtttcggccttcccgtcgacagtagaagcgctcacgacaagtcacttgataaagtgctggctgtgttcctgcgcgagtcagcgcgaacaggtgaaatcggcaacgtgttcccggtggtgtgatgagtgaactaaaatcaatgccgctggacaaactgcgcgcgcacgctcgcgatgtccagaaaacggcggactggctgcaatcgctggcagccgaggcgcagcgcgaagccgtgatggcgcgcagggaaatcaaacggaggaaaagaaatgcgtccgaactgttacaaccgaccgccgttcgctgatgggcggtgggaatacgcctctcagaagctggtcggtcatgataagtacggcataccggtttacaaaaccgttcttcgctggcgcccgcgctggttcgaagatcgctgcgtgatccacgacggccgcgggatcgggccgaacggggagaactacccggctgcgcacggatgggattgcagcgggtgcaggtgggagcctcacaaaccgaacatcgccggaatccctgtctttttcgacgaatccatttcgcccggaatggtcgtcgtggataatgggcacggaaagctgcaattcatcgacgcattcgaaccaatccacaggagcatcgccaagtgaaagcacaagacatcctgcgccagtccgcgcagcacatcgacgaccgctcggcaacgcgcgaccaggcccagggcgagcgcagcatggcgcgcaccgtggcggcgttcaacgcgctgacggggcatgcgctgacagagcgcgacgggtggctgttcatggtggcgctcaaggcagcgcgcgccacgaacacgccggcaggcattcccgacgactaccaggacggcgcggcttacttcgcgctggctggggagtgtgtggcggggaatgacaatgcgaatgaagaaaagcggggggcttttcgaacgataattttcatcgagggcgttggcgaagtcgagattccagacggctgcaaatgggtcgcgaaggatgaaagcggcaaatggtgggcgtatccgcgcgagccagtgcgggacgaaaccatgtggagaatcaaccccgtcgttggtcagcccggggctgtgcttctctgcgataccgatgaaggtaatggttgggaatacacgcttcacaaggtcatctaatgacaacccccacgcaacgcgtccgcgcgagcgaggcgcgcaagatcaaggccggcgggcgccgattgtcgcccatgcttgtgtcacccgaagccgcgcatgcaatagaccagttgttgcgcgcagggttcgcaggaagcattaccgcgtgtgtcgagcgggctattatcgacgcgaacaacaacaggaaaggacgtggacaataacagaatcaaaaatcagttctatgcggtgaacgcacttgcggaagcggttggcgtcgacatccacgatgtcacggacgcaagggatggtgtcgaaaaggcacaggtgctttgcagcttcctcgctgcgcgttcgggttggtggaatcggcgcatgccgaatgtgccggcgcagtgtcgcgaggccgttgttgcggcgatggggcgcgaaggcttcccgctcggcggaccgctcacgttcgaagaaatcgccggcatggtcccggaaaagctgtgcctgtcgcactccgaactgtcggaagcgatggaaggccatcgcaaggggctgaaggacgacaagcttccgcatcgctcgatgttggaagtcgagttggccgatacggtgatccgtgtgttcgacctggcgggcgctctcggcctggacctgtccggcgcgatgatcgagaaactcgcgtacaaccagcagcgcgcggaccacaagccggaagcgcgtgcggcggctggtgggaaggcgtactgatgaagatcgtcgccgcaatcatcatcaccatggcctgcgctgcatgccgaccggcaccaccgcaggcaaccgagaaccgtcaggcgcccggcgctgtcgcttatcttccggacgcggccggaagcagcgtgacccgtatcgatgacgcagaacgtggcgttacctgctacgtgagcgacgggtacaagtcaggcgggataagctgtatcaaaaactgaacttataggtacagtaaacacagacacgacccggcgcatgccgggttttgtctttgctgaacggcttcagaattttcatgcacgccgtggttgcattacatgtgtaacgcgtgagaggattcaactacaccaacggaacggcacgcagacatgagcatccagacctacagcctcactcacaacggcatgaaggcgattgcggcccaggacggaaaccgtcgcgtgctgaagcttgggcgctgtttgtttggttacgaaatccgcaagaacgctagttcgccgtggcgcacagctaagaccggctcgcacttctaccgccttgcaaagcaattaacctaacaaaaccgcccgggttcgccggggcatcaccgaggaaaggacaatgccattcgccatccgccaaacccgccacttctacggcccgaagaccgttaagtcgtacgtcaccgacgcataccgcaacgattcgcgcgccgagttcgcgacccgcgcggaagcgcagtcgacggccgacacgctggacaacgcaacgtatcaccttggtcacaacgaaagcggtcggccggaattcaaggtcgtgcgcgtgaggggtgcgaagtgagcggccctgtcgctgtggatgtgctggcggtgatgggggccgctgtcgagttgggtggcgggaacgtcaacttcaacatgattaacgctcgcgacgcagcgggcgaccttttcgcaaagacggacgaggcggccactgccatgcgcgtcgtggcgctcgccatcgagggcggctacaaaaactggacccgcgaggactgcatcgcatttctgcgcgaacacgcggatttagttgctgcgtccctagcccgcgcaggcggtgcgcaatgagcggcgcgcacgcagcaatcgggctggttatcctggtgctgattgccctcgcaatctctttcttcggcgataacgacaaggaatgaccgccagcagatgccgtttcaatgagacggcatcaacgggcgatccgacccgactaccgagttacacgacatgttcaatatccgtttgctgttcgcccgcgccgctcgcctgatggcatccgtcgcgccgctcacgcaggcccgcaatggcgccgccgcataccatgccgccagcgaccgcgcgccgtacccgcggccgtcgcgcagcaagtacatgccgcaccaggggaagcgggaaacgctgcggcgtcgcattggcgggttcgctggtgttgccaacatggtcgccagcgccgcaaacggtagcgcaacccgcgaagccgttacggccaacctggacaagtggcgcgctcgcgcatcctgaccgtcagcctatggccctgcacacgcggggccatacacgggcgatccgacccgattaccgagacaataccgtgaacaccagcacgcagcacgcactggtcggaaagatcatcaccggattgcagatcgcgagcgataggaaggcaattcgtttcatcacagaagacggcgaagtcatcgcgcgctgcaatggcgattgctgctccgatacgtgggtcgaggccatcgaagtttcggtgcgtgaattcccggcaaccgtgaccaccgccgaggacatcgccttgggcgacgatgaagaaaacgaagaaggctgcatcgcgcactacggcttccgcgtcgtgaccgacaagggccacatcatcatcgactatcgcaacgcctcgaacgggtattacggcggcgaactggtgtggcctggcgaacaccattacggcggcgtctacgggcagaacaattccaccgaggaatggaccgacgtttgaccgccagccgctgcgccttccaccgagggtgcagcatcgggcgatccgacccgcaacaccacgaaatcaatatgcgaccgagcgaactgcgcgcgcttcagcggatgcgcgatgggatttaccagcggaaattcgatatcgagaaggcgcgcgctgaagaccttcggcgacaggttcagcaggcgcgcaatgatcggttgttgtttcgcgctgccattgccgttggcagcttcatcgtcggcgccactgccgccatttttattcaaggaattttctgatggaaaacgaattcaggccgagtgaagaacaattgtctacgatccgtcgcgcgtacgatgacagcgacgcgatggcaggtgttttcgcgatgcataacagcatgcggacgcaggaggaagtaatcgcgttctactgcttctgcatgcgcgagtggcgcggcatcaccgaacgccgagtccatgatgcgttggcggcccctgctgccgctggtgtgcatgatgacatcactatgtctatggttgaggcggcatgcgaggctatatacatcaatcacaagctagcggggaaggctgagcgcgaagagcgagaaagcgaaatgcgcgccgcactttccgcagcgattgccgcacagcccgcaacgcagccgcaggcagagcagcagggcgcgggggatgcgctggaaatgatcggcgccaacttgcgcagcctgttcaagatgacggatgaggtggcgtcaaccgacacggtcgcatgggcgaacatgcgggacgaaatccagcatgcacagcagcttctggccgccgccatcgcagcccgccagccggtgggggagccatcgcactacggcgacccggaacgtggatttttcgtggaagcacccgtggttcccacattgagtgctgactacgcgtcgcgctactcgctgccgctctacaccgccccgcccgcggccgtggacttgccgagcggcatggtgctggtgcagaccgcggatgcggaaaggctttgcagcatcggggagtctttcgggcagcacttcgataagttgccggtgatgcgtgtgcgcgcgctgattgacagcaaggcggtgcggtcgtgatccggcggcttctgtgcaggtacttcggccacaggccggagacctgggggagcctggggcgcatcgggccgccccatcacgacggaatgggtcgcgcgcaccgcatggtatacgcgcagtgttgccgctgcgggcagcacttctgcgtgggtgatgttatcgacaagacgcatcaattgaaggagcagacccatggctgacattgaacagcgggcgcggtttgaagcgtgggcgaaaaccaaagacctgtcgattaaaatatgcggtcttaatgggttctataaccaccccgttacgcgtggcgcatggatggcttggcaagacgtcctcgcctcgcgggcgcctggtgtcagcctcgcgatggtgaatgagctttgcgaggcgtctagcgattaccttgcgtttgggcgcgacacggacaacagcgaagccagtaaggccggcgagcgagtatatgccgcaatcgaagcaatcgaggacaccgaagaaatgatcctctttaaggcattcggggagaggtcatgagccgctacacaaagaccgcgaatgtcggcggcatcgtctggacgatcatgtccagcaacgaacgcgaatgcaccgtggacggccggcacttcggtgcggggcgctgcaattcgaaacggccgtggactatctatgagcacgaccagcgaatcaccgagaacggccactgcaagctgttgcggcgctggcgtgggttcgacactggtagcctgtccttcgccgtgaaagccgtcgtcgcgggcatgattgaccggccggcagatgagtggccgtggttcccggtcccggcggtgagccatgggtgaccccatcggccgcccctggctgtgtccgcgctgctaccacgtcaacggcgcggatcaaggcgcgtgcgcattctgccggcgcgagcgtgtcaccagggcatgggctttcgtcatagtcgtgatgatgataatcggcggttcagttgtgcgcgagcgaatccacgaaatcatcacggcggcacatgcaggataactcccccacacacaccaggatgcccgcatgaacttcgatcaattcaacacgctgcgcgaacaggcgctgatgctgcacgcgagccagaccggcgaccacgtcgtcggcctggacgcggtgttcactgccgtggcgctgcacgcgtacagcgaccgcgcccgaccgcggccgatgccggccgcggacgcaccaccggccccgcaatggttcgctgacgctgtgcgctcgctcaagggacagcgcgtcaccgcatcggcgttcctgctgcttgcggggcgcacgcccgccacagacgtggaacggcgccacgttggccgctggctgcgcagtgctggcgtgcagccgcggaaggttgccggggagttgctgtttcagttgtgaggatcgcgcgagcgtagatcgaagaacccggccatgcgccgggtttttagttatgcgatgcgcttgaagtagatgcgatgacgatccttatccgtccagctttgcagcctgaagctagtgccaaccatcctcgctaaacgggcagaccttagcgccgcgttgatccttgaccgctcttgattgtaaccggtgacgaagaacgtatcgccgacgatcatccggtggattctgtaagtcgtcttcatgcccgcgatattaccgcggggacgtgtcatcgagttgtacccgccacttgtaccctaccttgtacccgccctaactcactgaattctaaggatatgagtaattatagggtagatgggtataagtattaggggaaaacgcaacaaaacaggacgtagacgaacaccttcatcctacgtcctgaaacggaataggtggttaggaccgagtcaccacgtgcccatgcgcccgctctaaatcatgtcgttgattttcaagagaattgatgcgggtacgaccacagggacaagtgggatcaactcggtacgtcgtgcccgccattcgcgaatgtgaatagttgtttctcggcgagtacacgggataatcacaggcgtgaatgatgcacgcccactaccgcgcaatgtccaggaagtcgccgacgtgatcgggcgtgacgctgcgttgcgtctagtggattcgttgcctcgcgcactgaatcgaccgtggcaacggtggtgctacgtaccgcagaagattcgccccgatcaccctttgtcgttgctgctggggtgggtgctggctgaaaagctggtgcacgtcttcggtggcgaaatgctcacgctgtcgaactgttcgtatacgcgcaaggatgagcgcgacgcggccatccgatctatgcgcgcttcaggtcgaagcgtgcaggatgtcgcccgtgaattccgcatgagtgatcgccaagtgcgaaacatcgtgaaggaaatttcgcaagtggaaacgaacgacaacatcgccaacactgccgcggcctgaaccaactatgagcaagcaccccccgatgaaacagcaagctttcgacgccacgaacggcaccatcgcagtgtcctacgtggcggccaccctgaacggatggactgtgcaggagtgggcggcgtttctcgcggggctgtactcggccgttctgctggtcgacaagttcttcccggcgatcctgccgtggttgcgtggcgcgctgatgtcgggtgtgtcggccgtgtggtcgcgggtggtgcgtcgtgggtaaggccggcaaggcatcgttcgtggccgccccgttggtcgtcgtcgctggcatcctcgccgccctcactggtgccgagggtcgcaagctggtgccgtatcgtgacatcgcgggcgtgtggacggtgtgcgatgggatcacgggcaaggccgtcgttccggggcgcacgtacacgaacgccgagtgcgacaagctgggccaggactacgtgcgcacgatgctggccgacatgggccagtgcgtgaagggcgaataccccttccatgtcatcaaggccgcgggccacttcgcctacaacgtcggcacgccgacgttctgccgttcgacgatggcgcgcaagttgaacgcgggcgacatccctggtgcctgcgccgaaatttcgaagtgggtgtatgtggccggtaaggattgccgcgatccgaagaacaagtgcgcaggcattcccaagcgtcgggaatgggagcgcgctacttgcgaggggcgcaacccatgaacccgaccacgatccgcatcgccgcgctggcgatcctgtgctttctgtgcggcctgttcggctggacgatccgcggatggaaggccgacgctgtttcttcggggcgcgatgcaagcgacgcgcaggcgactgtgcaggtcgtgcaggacgcgcgcaaggaagacaagcagacgcaggccggcgtttccgaagtcgaagcagagaacgcgcagcagcaggaacagacgcgcatcgaatacaagtacatcacccgtgaggttgtccgttatgtggctgcgaatccttcccctgctggctgtggtctcactgctgacggcctgcgcatctggcgtgccgcgaactccggatcggcaagtgccgaacctggacgtgccgggggcgtcggtgatgctgtgcccagcggaactgacgggcgacccgcagcagggcaagcccgagcaaatgctacaggcgcacgttgaggacgccgagacgtatcacgcatgcaggctgcggcatgaggcgctggtgaaggcgctgtgcaagcagcagggcgtgacgatcaatggtcgtgaccctgtggctgtgtgcaaggtgaagtgagttgcatgcgtggagcacgatgttccacgcatgttcgttccacgtgaatgctgaacgagttgttaaggcatcgtgaaggcagttgttaagatatcgttaaaaaatccgggtccttccctaagggggtgggcctgcggggt

SEQ ID NO: 18 - DNA, 43177 bp, unidentified
  misc_feature 1..43177: note = the genomic sequence of a bacteriophage
  source 1..43177: mol_type = unassigned DNA
gaaagcgaagcgggcgaaccgacgtattatatcgacggcgaagaagtcgattacaaggacttgccgaaaggtcttgacaagatcgccgacaagttgtacgaagccgggccgggcgaatacggctacagcgaaaccgaaccggactacgacggcccggactacgaacccgacgactattattgaaggagtaaccgcaatgcctacccttgccgaactgttttggcacttcgtcacgctttccagcggcgtaaccatcggcctaatgctggccgcatggttgcgtatgcaatcgaaagtcaccgaagaaacctacgacaccgattgcgaattcgtaaccgaatatatcgccaacatggaaagcggcccgaagatcattcgtcgcccgctgtcgcaatggccgatatgggcggacagcattaacccggccaagacgaacccgcccgaacctgaaccgccgattcgcattgaacgaaattttatcggcaaaaaggattgacaggctttcgaagctgtcgtattctttgtcgtaccaactggcaaccaaaaaggaatcgccgccatgtacgcacttattcttatcgcttgcactgtcgttgctgtcgctattcacttcgggcttatccgccccgtaatgcacgccatcgaacgccagcgcgaagaatcgcggcgtcgtgcggcgcttgaagctggcttggccgctgcggcgcgcttgcaggcgtttaacgcccgtaagccgtcgaaccatcgcggcgcaaagctgaacgccgaacgcgaatggcggttgcaggaatgaagcgcgggcacgtcatttacacgcacccggacgaactgtcgaaatgggatcgccggtttatcgaactggcggaacaagtcgcgtcatggtctaaggggccgcgcaagcgcataggcgcggccatcgtccggcctgataggtcgattgcgtcgcttggctacaacggcccgccgcgcggcttcgacgatgaagccttcttgcgcatgacgcgcgaagaacaacacgccgtcgtaattcacgccgaagcgaacaccattgcgcaggcgcacgacggcgaagccttggccggttacacgctgtacgtgtcgccgctgttcccgtgcgccgtctgcgcccgtcgcatcgttgacgcaggcattcggcgcgttgtcgcctattgtgggcacatttccccggactggcgcgcgtctgccgatgaagccgaagaaatcttcatcgctgcgggcgtcgaatgtctgttcagcatggattaacgaatatgacgcttgaccattcgcaaatcgaaggactgttgtttttcgaagaccccgtaacgcataacgtaatcggcgcagctaaggccgcaccgttggacttgtccggccatttcgtcgcatttgggccgcgcattaccgttgatccgcagttgaagaacttgtttcttgctgcgccgacgttgtatcaaacgctgtcgcagcagtaccaagcgattcaaggtcttatcgaaatcgccgaaggcttgccgcagacgccggaacttgataagctgcaacggtcgtttgtcgaaatgcaaaacggcatgttaatggcgcagcttgtcgcacaaaaaggcatcgaagaagttgcgaattcgcttgacaagccgccgaagtagtcgtagactgtcaaacatcgaaacaacgaaccaaggtgcccacaatgaagcgtaatgttaaagtcctgttggcgattgccgccattgttgccgctttcggcgtcgttggttcgatggactaccgcgacgaagtgcgcgaacagctttcatattgtgagaacgtgaagaacggcgtatggccggacttcaaggaatggggcaaaactgaatgcagccccgaacgtatcgcagaacttgaaaatattttgcgttgatcgcttgacacgtcgaacgaacagcgtaaaattacccctgtcgcaataacgcgacgttaactttccttcgaaggagtttcaaaaatggccaagtccaagaagtccaccgctaccgctgccgcttccgccgctgctgtgatcggtcttgctgaaatcgttgcagccggtgcaaacgggctgtatactacccccgaagttcacggcccgcttgtcgaagctggcatggtcgaactgaaccccgccgggccgaacgaatccggcgaaactctcacccgcgccacgcagaaaggtatcgaatccatgaacaccgcaaccaacaccgccccggccaccgtcgccgctgctgccccgtcgtccttcgccatcgaagacggcatcgccatgccgaccgcttccggtcgcggtcgtggcggcaacgtgtaccccttcgacgccctgaacgtcggccaatcgttcttcgtcccgaacaccgaagacaagccgaacgccgccaagtcgctggcttccaccgtttccagcgcgaccgcgcgttacgccgaagtcgtcgaaggccagttcaagacgaacaagaagggcgaacaggtgcccgtcacccgcgaaacccgcaagttcgttgttcgcagcgtcgaaggcggcgcgcgcgtctggcgtaccgcctaagcgccccggcgtgcggcctacgggccgcgctacggccaacacgaagccccggcactgtccggggcttctttttgcctttctgctggcctacggccattttttcgggtactatcgggacaattcggggcgcagttcgccccttgcgcgtattaaggggctacgtagtgccattggacaacgaagcggggcaggatatgaacgaacgtccgcagaagatcatagatgcaaagttgccgcttccgtggcttatcggatgcgcaaccgccatcgtattttcaatgggcggcgtattcgtcaaactggacgccgtaggttcgtcgctttcgaagttggaagcgaagaccgacaatcgggacgaacgtatttcgtcgttaatgcaaacgctgattcaacagcaaggcaagaacgatacacaagacgcacaaattcagcgcaacgcttcggacattagcgacgtgaaacgcgatgttgaagaactgcgcaaatctcaacgatggatgccgaaatgattaagaaggtcgaacttatcgcagaatggcgcttgttcttgaagttttggagcgtgcgactatcgcttatcggttcggcgcttctgtcggcgttcttcgcattccccgacgcaatggttcacgtctggaacatgattccggttgaactgaaagcgtatatccccgccgaatatgcgaaatggattccggttgcgttgatcgtttccggcgttcttgcccgcattgtcaaacaaaagggcttgcgaaatgacaacgaacctaccgccgaccgtcaaggcgaaaattgacgaaacgattaaggccgaaggcggcgcgaagatcacgaacgacccgaccgaccggggcggccttacgaagtacggcgtaacccaagcaacttgggccgccttccgcgaaccgtcatggcccgccagcgtcgccgacgcgacttacgaacaggccgtagaaatctacgcgaagcgttattggctggcacccggtttcgaccgcatcgccaacgtatcgccgccgctggccttcgaaatgttcgattggggcgtaacgtccggcccgtcgcgtcctgttcaagcgttgcaacgttcgttgaacgcacttaacacgcaagccgcagactacccggacatttccgccgatggcgtgttcggcgcaatgtcgcttgccgcattgaccgcgtttcgcaatcgtcgcgccgccgaagggctgcgctacctgctggacatggtgcaatcgttgcgccgcgtgttctatatcgaaatcagcgaacgcgacaagacgcaagaacgtttccaaaacggatggcaaagccgtatcaagtaaggggccgaacatgcttaccgtactttccgccatttggtcgcgcttcggcgcttggatcgcagcagccggggccgttcttgtcgctatcttcgcggcccttagtgtgggcaaggccaaaggcaaagccgcagcggcagaagatagcgccaacgaacgcgcgaacgaccgcgaagccatagcagttcggcaagtcaacgaagcgcgcgaagcatccgaaaccaaagtaaaggcggtgcaaaatgcgaacgaagttgcttccgataatgctgttcttgacgacgacggcgtttctaagcggctgcgcgacgaatggtcgcgcgactaagccgccgcaatctatcgccgaaaccgtacaaacgaagcctgtagtaatcgacacggcttgcgattgggtgcgggcgatttgggtttcgaagtcggacgacatgacgcccggcacggcgcgccaaatcctgaaccataatcaagccgtcgtaaagaactgcgggccgcagaaaccgcccaaggtcgattcgccttaacagaacgtcggccttgcggtatagtgaaggcaaatgcgaatgacaggccgacgccatgaccgaccaacgtaacgaatccgaagaaaaggccgcatatgcggccttgcttttgaaggaacgcgaccccttcaaggctgcgcttcaactgttccccgacaacacgaaccgcgccctatgggtggcgaatcattggccgattgacgccgaagtaaaggccgaacaagaacggctaatgggcgaagatgacggttcgtcgttccttccatcgaaggccgaacttgcccgcgacatttggcaacgtatgcagggcacgacccttgcaaacggcgtgaccattccgccgacccccgaagaatacgcgaagcttgcgaagctttatgcggacgttcgcgggttcatcgaaaagccgcaaacgaacgtaaacgtaaacaatattacgcaacgtgtcgtcgaagttcccgttttccaaagcgaaagcgaatgggaaaacgccgccgcacgtcaacagcgggaattgttagaaaatgcccgcactcgccattaaagcgcccgaagcgccgccgctgattctacagaaagcgccgccaatcgaagtcgtatttaagccgcttcccggttcgcagacgattgcgctttgttcgcacgctgcgcataccctgtacgaaggcgcacgcggccccggcaaaaccctaacgcagttaatgcgctattaccgtaacgtcggcaaaggttacggtaagttctggcgcggcgttatcttcgatcttgaattcgaccatttggccggacttgtcgccgaatctaaaaaatggttcggcgataatggcaagcttaaagatggggcgaagttcttagaatcgccgtcacaatacaaatgggtttggccgactggcgaagaactgttgtttcgccacgtaaaaaaggtcgccgattatgaaggcttccacggccacgaatacccgtatatcggatggaacgaactaacgaagcatcctagcggcgacctgtacgacaaatttatgtcggtcaaccgcgttacgttcgatccgatcaaagacacgccgaaagacccgaagaccgggcgttatttgacgcctaacggtctgccgctgcccgaaatcaagtgcgaagtattcagcacgacgaacccaagcggccccggtcataattgggtgaagaagcggtttattacgattgcgccgcgcggcactgtcgttcgtcgtagtatccagatttataacccgaagaccgaacaagaagaaacgcacgtaatcacgcaaattgcgatcttcggttcatacaaggaaaacccgtatcttccggcgtcgtatattgccgaactggaaagcattaaagaaccgaaccttcgcaaagcttggttgtatggcgattgggacgttaccgcaggcggtgcaatcgacgacctttggcaatcgcatatacacgtcgtaccgcgctttgtcgtgccgccaagctggcgcatcgaccgcacatacgacgacggcagttcgcacccgtttagtgtgggctggtgggcggaagcggacggcaccgaagcgactatcgttctttccgatggaaccgaattcgtgttctgtccgcaaccgggttcgttgattcagatattcgaatggtacggatgcaagaaggacgaaaagggcgaattcttgccgaacgtcggtcttaaaatatcggcgtcggacgtagcgcaaggcattatcgaccgcgaagtttcgatgatggcgaacggctggatttcgtcgcagccgtggcccggccctgcggataatcgcattcgacaagttatcgacgttgaactagacacgaccgaaaagcttatgtcgaagaagggcgttcgctggatggaatcggacaaatcgtcgggttcgcgtgttatcggcctacagcttttccgcgaccggctagaagcgtctgttaaacgcgaagggccgggggtatacttcatgtcgaattgcgttgcaagcattgatattttgcccacattgccccgcgacgaaaagaaaatcgacgacgtagacacaagcgccgaagatcacgtttacgacatgacacgttatcgcatgttgaaaggcgcgaacaaagcggctacgaaagtcaaagtatcaatgccaacttaaaggaatcgaaatcatgccgaacgtatcttttgtgcgtcctgaactgtcgaagttgcttcccatgtactaccttattcgggacgcaatcgcaggcgaaccaacggttaaagaagcgcggacgaaatatcttccgatgccgaacgcttccgaccaatcgaaggaaaacaaggcgcgttatgatgcgtatatcgcgcgggccgtgttttacaacgtagcccgtcgaaccttgttcggtcttatcggacaagtgtttatgcgcgatccggtcgtaaaggttcccgccctgctgaacccgcttgtcgcaaacgcgaccggatcgggcattaaccttacgcagctttcgaagaaggccgtatcgttgaacttggcgtattcgcgcgccggaatcttggtcgattatccgacgaccgaaggacagggcggcgcttcggttgccgaactggaagcgggcaagattcgcccgacgctgtacgtctatgcgccgaccgaaattatcaattggcggacaattgatcgcggcgcggaagaagttttgtcgttggtcgttatcttcgaaacgtggtgcgttcaagatgacggcttcgaaatgaagaacagcggtcaattccgcgttttgcgtctggacgaagaaggttattacgtccatgaaatttggcgcgaaccgaacccgaccaaggcggacggtacgaagattccgcgcggcaattaccaacttcacgaagtattcaagccgaccgatgcgaacgggaatcgccttgacgaaatcccgtttatgttcatgggttccgaaaacaacgacgttaacccggataacccgaacttctacgaccttgcgtcgctgaacttggcgcactatcgcaacagcgcggattacgaagaatcgtgctacgtcgtaggccagccgacgcccgtacttaccggcctaacggaagaatgggttaacaacgttttgaaaggaacggtcaacttcggttcgcgcggcggcattccgcttccgaccggggccgacgcaaagctattgcaggccgaacctaacaccatgcttaaagaagcaatggatacgaaagaacgccaaatggtcgcacttggcgcaaagcttgtcgaacagaaagaagtacaacgcaccgcaaccgaagccgaattggaagcggcgtcggaaggttctacgctgtccagcgcaacgaagaacgttagcgccgcgttcgaatgggcgttgaaatgggcggcgcgctggatcggcgcgggcgacgctggcgttaagttcgaactgaatacagatttcgacattgcccgcatgacgccggacgaacgccgccagattatcgaagaatggcagaagggcgcgattacctttaccgaaatgcgtacagggcttcggaaggctggcattgcaaccgaagacgacgcgaaggcgaaggccgatattgccaaggataccgccgaagcgatggcccttgccatgccggacaacgtaccgggcgacggcaacacgcccccggctgataatgtgggcaacgggggtgcgtaatcatggcgctatcggataacaagcgcctatacgacatttcaacgcggcttgccgtatatgtcgaaggcgtcaaagttcagcagtcccgccaattcaacttcgtattgcgtgacattagcgaagttctgaaaaagcttcttggtcgtgttcgttataagacccttgacggtctttcgaaggcgcaactaaataagcttgtcgcagaactgcgcgaatcgcaatcgaagatttacagcgcgtacacgtcgcagcttattgaacagcttaaagcgttcatggctgcggacttggaagtaaaccgccgcgcatgggttacggggtatattgaacttgacggcgattcgtcggacgaaatcatttcggacgaagacgcaatacagttcttaatcgaagccaacgacagcggcgcaaatccgttgttcggtatcgcggccattactggcggcgacgaacgtatttggtcgcaagttacgaattcgccgcttccggcgaacgggctttatcttctgccgtttatcaagacgtttacaacgtcggcgcaagcgtcaatcgaaagcatcattcgcaaggcatgggcgaatcgctggactgttgacgaaaccttgcgcgaaatcatcggcgaagaaggcgcacgccaaggcacgccgtcgcagcttgcgcgaatcaacaaccaagccgcgtcggttattcatactgcctttgcgcatactgcggcaatcgtagcggctggcgtagcgtctgcggtttttagttggtacgtttggttttcggttatggatggcaacacgaccgaagtttgccgaagccgcaatcggaagcgttatcggtttggggccgggccgttgccgcctgcgcacattcgttgccggtcgcatactgccccggcgaatacggctagtgacctaatcgacgaaacgttttatacttggcttgcgcgtcaaccgctggaagtgcaagacgacatattaggcaccgaaggcggcgaagctttacgcgatggcaaattgaaagcttctgatattccgaagtacgaagccgacgaaccgctaacgcttgacgaattccgacgcaagattaaacagattctttcccgctgatacggtgtatcggcataacctgtaggagtcctacgaaatggcactgaaaaagcgtattaccaaagaagaacattcgaagcttaccgacgcgctgaaattcgaatatgtcgaagacggcgacggtttccgtctggacgttgacggcgacgaagacaccggcccgcttcgccgcgcgaaagaccgtgaagcgcagttgcgccgcgatgctgaaaagcgggccaaagaagccgaagaccgtttggccgaactggaaggcgacgacgcccgcaaaaagggcgacattgctacgcttgaaaagtcgtggcaaaagaagcttgacgatcaaaagaacgaatacgaaggcaagatcggaaagcttacgacccatacgacgaaatcgcttgtcgataacgtcgcgctttccatcgcaaccaaaatcagcaacgcacccgcgattatccttccccacattcgggcgcgtctgcaagcggacttcgaaggcgacgaaccgaagacccgtattcttgacaaggacggcaagccttcggcaatgaccatcgacgaactgtcggcggaatttgttgcaaacaaggatttttctgctatcatcaccggcagtaaggcgtccggcggtgccggtaagccttcgcaaaacggcggcggtgccccgaagaatcccggtcaatccgacaaacccgccgacctttcgaagatgaatccgcaagaacttgcggcgcatctgaaagaagcgaaggctactactgaataaggacgctttatcatggcactttccgacctcgcggtttactccgaatacgcctattcttcgttctccgaagtcctgcggcagcaaatcgacctgttcaacgctgcaacgggcggcgcgatcatccttcaaggtgcggcgcaccaaggcgactttagcgacgtggcgtttttcgccaaggttgcgggcggccttgtccgtcgtcgtaacgcctacggcaccggcgctgtcgccgaaaaggtgatgaaacaccttgtcgatacttcggtgaaggttgcggcaggtacgccgccgattcgccttgaccccggccaattccgttggattcagcagaacccggaagtcgcgggcgctgcgatgggccaacagcttgccgtcgatacgatggccgacatgctgaataccggccttggcgcgacttacgccgcgcttacgcaggttacggcggtcaagtacgacgccaccggcaacaccgcgccggacgacggcccgacttggaacaacctcaacaacggccaagcgaagttcggcgaccagtcgtcgcagattgcggcatggatcatgcacagcacgcccatgcacaagctgtacggcaacaacctgaacaactccgaacgcctgttcacctacggcaccgtcaacgtgattcgtgatccgttcggcaagctgctggtgatgaccgacagtccgaacctgtttgcggcgggtacgccgaacgtctatcacattcttggccttgtgccgggtgcggtgatgatcggccagaacaacgacttcgacgcgatggaagaaggcaagaccggcgacgaaaacctgattcgggtttaccaagccgaatggtcgtacaacgtcggtgttcgcggcttcgcatgggacaagggcaacggcggcaagtcgccgaccgacgcggccctgttcacttcgacgaattgggatcgttacgccacgtccgaaaaggatttggcgggcgtgatcgtcgaagttcactaaccaacgaacgaacgggcggggcttcggccccgttcgtttaatcctttcaatcattcggagtaatacgaatgaacatcggagataatgcaatgaagcctgcaaaaattctgtacttcgtcgatggcccggccccgacccccgaagatttcgccgcagccgccgaactgaacgcaagcgtttcgttccgcaacgcacgcgccgtaccgtccgaagcgcattcgctggaaatctgcgacggcgtggcgggcgcagttccgccgatctacgccgaaaagttccccgacgccgccgaagctatcaagaagaaggccgccgaactgaaagaacttacttcgaaggtcggcgacagcccggcaccgaaggccaagggcggcaagaccggccagcaagcgccgcagcagccgcagaccccggcccccgcaactggcggccagcagcccgcagcgggccagcaaggcggcggcgcgccgtcgtggaacccgaacccggcgcagtaaggccgggcgcagcgtagggcgcggcctgttcgcctagtgtgggcaggccgtttttataggcgcaacgaaaggacaaacgaacatgcaacgcattgtctattttaccgcaggcattaccccgacttcgggcgaactggcagatattgcaaagttgaacgcagccgccgaagccgcctacgaagtcaccgtagttaatggcgcagcgaatgcgaagtacggcgaaacgaaccgtcttattccgtgcgatttggtcgcgggcaccattccgaccatttacaacgcgaaagaagttatcgaccccgacgcaatcccggcgcgcggtttggccgctaccgaagcaatcgtacagaccggaacccccatcgctgtaactggcggaactgtaacgtttaccgtcgttgatagcgaaatcacgggcggcgttttcaccccgacaccgtaaggatttggcatcatggcaattactatcgtagtcgaagacggaagcggcgtagccaacgcgaacagttacgtaagcgtcgcggatgcgcgcgtatacgcggccaatcgcggcaccgaacttccgttggacgacgacgaagtagccgcgatgttgattcgtgcgacggactacctagaagcgcaggaatgccggtatcaaggcaaacgcacgtcgccgacgcaggcgcttgcgtggccgcgtaccggcgtattcctgaactgcgatgaagtcccgtcgaacgttattccgaaatcgcttatcgccgcacaaacgcaattggcgatggcgattaacgcaggcttcgacctgcaaccgaacatttcgccgcaggattacgtaacgcgcgaaaaagtcggcccaatcgaaacggaatacgccgacccggtagccgttggcattatgcccacgtttaccgcagcgaacgcgcttcttgcgccgctgtttggcgaatgcgcttcgaacaagtttgcacttcggacaattcgggtttgacgtatggcacgctttgaccgcgcgattcaaacggcgttgcgattgatcgcaaagaacggcgaaaaggtgaaatggcgcgttattgacgacgcagccgcacccgatccgtcgcagccgtggaaccccggccctgcaacgcccgaagacaaggacgtaactatttgcttcttgccggttgatcggcaaacgatggaaacatttacgtttatcaaaggcaccgaagttccgaaaggttcggtaatggggcttatgggaaacgtgccgtttaatccgaacttgaaagacgtagttattcgggatggcgtagaacttcgaatcgcaaatatcgacgttctttcgccgaatgggcaaaaggtactttacacggtagtttttcaagcatgattgaatttgaccaagcccgcgacgaaatcaatacgctgtttcttacggcgtggaacgctaacgcgggcgcggtcgtcggctatgttcccgaaattcgttggcagggcgtacagtaccgcgatttgccggacggttcgaagttttgggttcgcgtgtcgaaacaaaccgttttcgaagaacaaacaacgctttcaacttgcgaaggaaaaccgggacaaaaacgttatacggcgtcggggcttgttttcgtgcaagtgttttgcccgaaatcgaatacgcaagctttcgcacttggtcaaacgctggcgaagattgcccgcaatgcttttcgcggaaagactacgccggggaagatttggtttcgaaatgttcgcataaacgaacttgaccccgaagaactgtacgaacggtttaacgtcgttaccgaatttgaatacgacgaattaggttgaaggagttacgaaaatggccgattgcgctatcaacaaaatcgactcgaacattaccggactggcgtatgccgaagaagaatgcttgaagcaacttccggcgtccgtcacttggtacggactggaaccgaacagctattcggacttcggcggcgaactgtccaccgtagcccgtgcgcctatcgacccgtcgcgccagaacaagaagggcacgattaccgatcttgacgcatcgggcggcttcaattcggactttacgaagtcgaaccttacccgcatcctgcaagggttcttcttcgcagacgcgcgcgaactgccgtctactgcgccgatgaacgccgcagctatcgcaatttcggctgtcgatgctgcgaagaagacctataccgttgcaagcggcggcgcggcctttgcggcgaatatgcttgtcaacgcaaccggctttgccaatgcgtcgaacaacggccttaaaaccgttgcgtcgtccaccgcaacgactgtcgttgtcaatgaaacgcttatcgacgaagccgcgccgcctgctggcgtaaaactggaagtcgtcgggcgtcaactggccgcagccgatgcgaacatcgccgttacttccggcgtcgcttcgttggtcgtcaccgctggcgactttacgaccatgcccgaactgttccccggtcgttgggtgttcatcggcggcgacgcggcgtcgaaccgctttgcaaataatgtgggctacgctcgcattaagtcggtttcggcgaaggcgcttgttttcgacgatacgaccttcgcggctgcaactgaaaccggaaccggcaagtcgattcgtctgttcgtcggcgtcgttatcaagaacgaaaaagacccggcccttatcaagcgtcgttcgtacaacatcgaacgcacgttgggcaacggcgaaaacggcgttcaatgcgaatacttggaaggcgcggtagccaacgaatttacgttgaacattccgcaggccgacaagttgaacgccgatcttacgttcatcgcgtgcgacaacacgcaccgcagcggcgaccccggcgacgaacagaaggccggtacgcgcgttgcggcaccgggcgaagatgcgtacaacacttcgtcggatatttaccgtatcaagatggcggttcacgacgacgcttcgtcgaatcccgccgccctgttcggttacgtgtccgaagcgaacgtttcgattaacaacaacgtttcgccgaacaaggccgtcggtatcttgggcgcgttcgacacgacggcgggtaacttcgaagtcggcggttcgattaccgcttactttacgaccgtcgcagcggtgaaggcggttcgtgcgaatgccgacgttggtttgtcggttatcagcgcggcgaagaacgccggtttcatcttcgacattccgttgcttggtttgggcggcggtcggctgaacgtcgaaaaggacgcgcctattaccgttccgcttgaacccgcaggcgcggaaaacgcgaacggttatacgatgctgtacgaagtgttttcgtacctgccaacggtagccatgcccgattaagtcgggtacacttgaagggccggacttttccggcccttctttcatccatcggagtaaatcaaatgtctggactgtttaagcaattcaaaacgaattcggcgaaggaaaccgaaggcgtcgaaatcgaatttcccgaagcgcagaacgacgacggcaccgttcccacgttcatcatttcgcgcatgggcaagtcgaacaaagcgtattccaagtcgctggaagccgcgacccgcccgtatcgccgacaggtcgaattgggcaccatgaaaaacgaagtcgccgaacagcttttcatgggcgttttcgtcgataccatcctgcgcggctggaagaacgttcaggacgaaaagggcgaagccatcgcctattcgaaggacgcggcaatttcgcttctgtccgaactgcccgacgtttacgaacgtctgcaagaagaagccaagttgtcggccaacttccgcgattcggtattggaaactgaatcgggaaactgattgaagttctagcgtatctgttcgaactaggcccgcacgaacagaccatagcaaaacaggcgatgcgggcgggccagccgttacccgaccgcatcgccaacgcgccagaacttgaaccgggcttgcagttgtatttgcaagccttcttcgatttggatagcgaacgaacgcacgcaatgggattgacgccgattccttggacaagtattgcggcgtatgcgtcggcattcgaattcgacgaagaacagcgggaagacttgttttatttcgttcgtaaactggattcggaacatttgaagaaacttgaagcgaagcataaggcgaataaaggcaatggcaaacgaccttctaagtctggccgttagtctggaacgcaaggctaaggcaatcgacgaagcggcttctaaaacagccgtcgataccgcaatggctattgtgggcgacttggcgtataagacgcccgtagatacttcgcaagctttgtcgaactggcgcgttacgcttgattcgccagcaaccgggacgattgcaccgcattaccccggccttcaaggttcgtcgcaacgggcaagcgcagccgaaacgatcaacgcggcaaaaagcgtacttgcaaacaagaagcccggtcaagcgattttcattacgaacaaccttccgtatatcaagcggcttaacgacggatattcagcgcaagcgcctgcgggattcgtcgaacgtgcggtattgattggccgcaagatgcttgcgaagttcaagattaaggattaagacgaaatggccgaaaacatcgaaattaaagtacaggataaagtcgattcgtccatttcgaccaagcttaaaggcatcgcttcggatgcccgcaccgccgacagcgccgtaaaggcgttgcaatcgtcgttgaagtcgatttcggcttcgtccggtctttcgcgtcttcaaagcgaacttgcacgtaccgccattctacagcagaagcttgccaccgaaacgcagaaaacgcaagtcgcaatggcgaacgttgaagcggcgttgcaacgtgccatcgcagccgaagccaaggcgaacgccgcgattaaccaactttccgccgcgcagtcgaaggccgccaccgaagcgcaacgtttggcgacagcgcagcagcagaccgccgccgcagcagcgcaggcgcaggccgcacaagcgaacttggccgcagcgcaaaccaacagcgcgaccgcatcgcagcggcttgccacggcgcagcaacagacgaccgcagcaacggccaacgccgccgcagcgcagacgcgcgcggctacggcgcaggtacagggccagaccgccgcgcagaaccttgcagcggccaccacgcgcgccagcacggcccaaacgcagggcgcgggggctgcgcagcgtcttgccaccgaacagcagcgtacagccgtccagacggccaacgcggcggcggccaacgaccgggcggcccttgcagccctgcggctggcccaagcgcagcagcgggccgggcaggcgtcgcagaccgcaggccagcaaatcgccggatacgtcaaagccgccgcaggtatcgcaggcgtaacgctgtcggctggcgctattctcgcatcggcggacgcatatacgacgctgcaaaacaagttgcagaacgtcaccgaatcgcaatcgcaagtcgtaacgcttacgaaagaattgttcgacttggcgaaccgcacgcgcgcaggtgtagaagaaaccgcgacggcgtttacgcgctttgatcgcgcgttgaagttcatgggcaaatcgcaagaagattcgttgcgtttgaccgaaaccattaacaaagcccttatcgtttccggcgcaactgcgcaagaagcgtcgtcggctttgttgcagctttcgcagggcttcaacgccggtaagctgcaaggcgacgaatttcgcgccgtatccgaaaatatgccgatggttcttgacgcagtagcgaaggcgcttaacgtgcctatcaaccgcgttaagcaactttcgaccgaaggcaaaatcacgtccgaagttctgtttaacgcattccagcttatacagaagtcggtcgatgacacgttcgcaaaaacgacgcccacaatcggccaaagccttaccgtcttgaagaatagcgcaattgaattcttcggcgaattgaacaaggcgaccggcgttacggctgcgctgtcgaaggcgattctttggcttgccgacaacatgaagaccgttgccgtcgtagttacggcgcttggaacggcgatgcttcttgcatttgggccgcagattgttgcggctatcgtttccgcaacgactgccgtaaaggcgttcactgtcgcgcttgcgtcgaacccgattggccttatcgccgtcgcactggcaaccgtcattgcgtaccttacgctgttccgtgacgaaattaacttgggaatcgacgacgttacaacgttgggtgatttcttccgcgcgaccttcgaaggtatcgggcaggttattagcgacgtgaccttgattgtcggccaattgtgggcagacatgaccgaaggcgcgtccggggcgcttggcgaaatttcgtcgttcgttggcgatgccgtttccggctggacggaagactatacgtcgttcttccagaccgaacgcaccggatgggccgccgcgctggaaaacaccgcgaaagttcttgacgcaatcgccggattcattaccggccttgcaacgttcgcaggtcgtgctatggccgaagtcgtgattaccgttcaaaacggaatcgcaaacggctataactatatcgtcggatggattgaacgggttacgaatctggcgattgaatcggcgaataagcttcgcgcgatggtcggcaagtcggcatacgaacttgtcaacttcgaacgcatgggccaagccggacaaactgaattcgaatcttggggcaagctttgggccgaatcgctagaagacggcttcaagtcccaaggcggcgcaatgcaaaaggtcgttgaaggtcttatgacgcgcgcgcaacaaatcggcgcgaatcgtcgcgcaagcgaaaacgcttcgcttcgcggcgcaggtgcgaaccaacttagcgcagctaccgacgacaaggcggcgaaggccgcagaacgtcgcggcttggcgttggaaaagatcaatacgcagcttgataacgaattgaaccgcatgtttacgcttcaaccgcaacgcgaagcgcaagcgaaaatggatcaaatcgaagaatcgttgattcaacgtaaaatcaagcttaccgaagacgaacgcgcttcgatcatggcgaagattcaggccgtccagcaagcgcaaatcgtgcaacagaagttcgacgcgatttataacgaagctgtcggcccgcaacgcgattacaccgccacgcttgaagcttcgaaaaagcttcttgaccttggcgcgatttcgcaagaacagtattcgcgcgcagtaacgaaggcaaccgaagaattcaagaacgcgcaagacccgatgcgcgcgtataaccgcgaccttgaccaacagttgcagcttttgcagttgttgccgaagcaacgcgaaatcgaacagcaggttatgcaagtgcaaaacgacctgttgacgaagggcattacgcttaatgccgaagaacttacgcaactgcgcgaacggcttacgctgttgcagcaggcgaacgcgcttgcgcagcaagaagccgcgctaatggacgcaagcgttacgaagcgccaacagtatatcgaccaattgaaggcgattaacgcgcttaaaaacaatccgcaaagcggcttcacgcaaggcgacgcagctaacgccgtaatgaacgcgaacagcgatcttgacttcacgaataccgatacgtatttcgaaggccaagcgcagaaatacgaagatatgtattcgcgtatcgaccaattgcggcaacaggatttgattagcgaacaaaccgccgcaacgctgcgccaacgtatttggcaagaccaacagaaccaaacgcttaacatcgcgtcgggtttcttcggacaaatggcgcaattgcagaagtccgaaaatagcaagatggccgccgttggcaaggccgcagctatcgcgcaagcgatgattaacacgtatcaagctgcgaccggcgcgtattcgtcgcttgcgtcgattccttacgtcggcccggcgttgggtgcggctgcggctgcggctgcgattgccgcaggcttggcgaacgtccaacaaatccggtcgcagaataccggctttatgtcgggcggttataccggcgacattccgacgaatgccgtagccggttcggttcacggtcaagaattcgtaatgaacgcagcttcgacgaaccgcattggcgttgacaacctgcaagccctgcaaagcggcgcggccagcgtccagcgcaacggggataatgtgggcaccggccaagctggcgcggctgcggcaccggaagtaaatgtaactacgccggtaactgccgtcgtggtacaatcgaaagaagccgccttggctgcgatgaagtccagcgaaggcaaagcatttattatcgaaactatcgaagaaaacggcggcactgtcgcccgaatcgtaggggttaaataatgggatacgcaatcggaacccttgcaaaaggtggcggcgacgactgccattatcaattgcttggcgtgttgaagacgcttgccgaagcgaacggatggacgacgcttcggtatgtcaataccggcaccgaccgcgaattgattttgaagggcgtaggtctgtccggcaccgaagaaattttcatcggatggaagacctatcaaagcgtcggcgcggattactacaatctgaattgcgcaacgtttgtcggatatgtcgccggaaataccttcgaaacgcagccgggcggcaaatacagcggttgtcctgcccacaataacgcaattacgtatttcatcacggcgaacgcgcaacgtatcgcgttttgcctgaaagtcggtacgccggtttacgtgcattgctacgcgggcaagctgtttccgtatgcacgtccgggcgaatatccgtcgccgttggttatcgcttcgatgttcgacgggccgtccgcaacacgcttcgataatacgtcgtatgtcttcccgtatcccggccaaggttattcgacttcttgtcgtatgtggctgcgcgacgctgcgggtaattggaacacgacgtattgttatccgttttccaatgcgaatagcacttcgaacgcacttgcaggcccgcaaggttcgaatacgctagtccccgccgacgtgtattaccaacttgaaccgattattcttcaacagttggacacgtccattaacccttctaacgtatggggcgaactggacggcgttactttctgttccggtttcaataacggccctgaaaacgtcgttcaaatgggcggaagttcaaccgtagatcaaaccggaatgaccgtacttcaagcggttgacgcaatccgggcagttggcgggcgtgcgttcgtagtttgtcagaacgtgcgctttacttcttggcgcgattatatcactttggaaatgtcgtaatggcctacgtaaccggaagcgccgcaagctttgcggacttgaaaacagcaatctataacgcagccgtcgcagcgggctacacgttgtcgaacgacattatttcgaagaacggttgtttcttcaaacttacggcgtcggcgtcggcgttgggtttgcaaggcggcaccgcgcaaagcggttcgacgcttacgaacccttcgggaactgtcaacatggcaagcccgacaagtaacggaactatcgtttttcccgtgaattacgaaattcattcgttcaccgggccggacgaattgtattgttttattaactacaattcggactattatcaacatatggcgttcggtaaatccgcaatgccgggcgtaggtcttggcgcttggcttactgcaagttggacaagtacggtcggcgctggcggactgaatttgcaagttagcaaacaaagcgttcgaccgtatccatttaacggcgcaatgaactgcggtcttttttgcggtggcaattggtcggggccgaacatttcttcatattatcgaactacgcttgacggcgaagcttggtattctttggaacagaacggtacgtatattaacgcggcggaagctgtagcttcgttgcttacgtctttgccgaacgcttccaatcaagcaacggtattgcttccggttaaggctatcaaaaatcgcagttctggcggatttactaccgtagtcgatttgcagaacgcgcgtctttgtcgaattgacaacttgacgcccggcgatcttgtgacgtatggccccgaccaatggaagatttatccttggtatcggaaggacattaacaaccgcaacgggcaaaacacttcaacgtctacgccgcgcccgacgcatagcggtacgttcggcttcgcaattaaatacaccgggacgtaattagatggctggacgacttgccgcaccggaaatgcaacgtccgattttcggcgaagttaacccgaacgatatatcggacgaattgaacgaaataaccccggcggactacgatccgaccgggtatcctacgcgccagttcggccaatgggggccgtatcaacgttatcgaatggcggcccgcaccgcatggcctattgttggcgcgcgtcaacatagtttcttcgaagattattacttccgcatccacgtaacgccgcaagaaatcgaccttcaaactgtcgcaagtacgcaggtgcgcgaagttgacgtatggaacgcatatccgtttacgtcggcgattcttcaagatattttagtaaacaatcctgtcggcgttagcgtcaacgggccaaacccttacacgtatccgccgcttgtcgaacagacttacgaaattgaagtaggtacttccggccctgcgaatatcgaccttcaaattcaatttgattttgcgaacgtaacgaatccgcttccggtacttgttaccggcacgcgcgccgttaagttcgacattatccctgaaacgccggtaacggaagaatggcaatggcttaccgataacatcgtagccgttgacggcaccgaacagcgtatcgcgctgcgcggtgaaatgccgcgcgtcgaagaaaacttgaaagtcattttcgacaattcaacgaagattcggaaattctatagcgatcttatggccgcagtcggtcggctttggattcccgaatttcagtacgcaacgcgcacgctttcggacagcgtaacgggtggctttaacctttacttcgacacgtcgaagaccgacattcgcgcaggcgaatacgtcttgattcaaacgccgttgaccgctgcgcttgtcgaaattgacgtattgaccgtaacgggcgctaccgtaacttcggctttgacgtttgatattccgaagggttcgcttatcatgccgggttcgcccgcgctgttgaatgacggttcgggactgtcgcgctatgctgttaacgaagttgccgaaacgacgttggtttgcaagatgcttcgccagcgtgcgcagcttgtgcgccccggatcaaccgtaacgcttccgacgtaccttggcgttccggtcttcgaaaagcgaccgcttgccgatgaaatggtagacgacaacgtatctaccggccaacagtcaatcgacaatcaaaccggattgccggatattatttcgcgttgggattatagccgtattggcggcgcacgttcgtacaaagtgaaccgcattcaacgtcccgaagaaatggactattggaaaacgctatttgcgtatatgcgcggcgcggcgcgtaaagtttgggtgcccacataccgaaccgacatgcgcgttaccgtccagcctgccgaagaaacttcgacgttcacaatcgaaggcaccgaatacgccgaaaagctgtttccgattgtcacgcatcgttatatcgaagttgaaacggcttccggtattcatcgcgctaacgtaattggcgcaagcgtaagcggcgtcggttcgattatcctgtttaaccccggccttccggctggcgcaggctggacggacattaagcgaatttcgttcctgttgcctatgcgaatggccgaagacaaggtaacatggaagcattacggattagaaagtttacttcaactttcgttgattacggcggaaccttaaatgtccgattacgacgacaaagaaataagccagcaagacggcgcgccatacgaactttacgaatgggtcggaacttaccgtagttattacatgactacggacagcataccgcacgttttcaacagtgcgacgtacaatcctgtttcgggtttgaagcgcagtacgttaaaagccggtacgcacgaagaagacaatatcgaccttacgattatcgttccgattaccgaacaaatcgtaaaagactacggttttcaaactacgccgcccgcgctggatttgacgatttatcgtttccagcgcgacgccgcgacgtatgttccgtattggaaagggccggtcgcttcgatcatcattagcggcgaagaagcaacgttgcgcacgccaagcaagttcggaaatatcttgcaaggtaatattccgaacgtgtacgtacagccgccgtgcaataacgttctgttcgacgaacgttgcaaggtaagtcgcgtatctaattcgctggatactgtcgtatctgcgataagttcggacggcttgcaaatcagcattccgtcgattggttcgtttccgaacggatggtttgtcggcggtgaaatcgcaattccggcgcgcaacgaacgccgaatgattattgcgcaagctggcgcaattctaacggtcaactatggattttcgcgtatttctgtcggcacgtcgattcaagttacggcgggctgcgatcatagcttcacaagcgcgaacggttgtccgaagttcaacaaccaaataaacttcggcggttgcccgtttgttccgggcgaatcgaataacccatttacgaacggaattagctaatatgtgggtcgcaatcgttatcgcggtaatcgcgttgcttatggtcgcgtttatgccgaaaccgaacgtcgaaaacgcgcgggcggcgaagcttggcgacttccaagttccacggtcgaaatacggcgatccaatgcccttagtgtggggaactgttcgccagaaatcgccgattacgttttggttcggtgacttccgcccggttccgatcaagaagaaagtttcttcgggtttgttcagttctaagaaggttattaccggatataaaaactacgtcggtatcgactgctgtttgtgccttgggccgggcgtcgtacttcgtaagttttgggccggtacgtatcttgtttggactggcaccgcttcgggcattacgaatatcgtaatcaatcaaccgaacttgtttggcggcgaagatcaacgcggcggcctgcaaggtacgtttacgttctacgacggtcgttacgatccgccgcgcgattcgtatttggcttcggttcttgatccgaacgttccggcgtacaatggttttgcgcgtgccttgttcaagtcgttttatatcggcacgacgactaatcttgaaatgttcagcttcgaaatttcgcgtatgacttccggtcttcacgcgacgtattcgattatgccgaacggtcttgatttgaacccgatggaaattgcttatgacgccattacgcaaaagttcgggcgctttggcaacttgccttcggttctggacttgccttcgttcgttgcgtgcgcgcaaacgctgtataacgaacaaatgggcatgtctatggctgcgcaatcggccattacgggcaaagacctgttagaagaaatcatgcggcaatgcgacggcttgctgtatcaagacccggcaacttcaaagattgttgcgaagttaattcgccaagattacgacattaacactttgccggttcttgacgaatccattattaaggatttgaagaacttttcgaaaacgacttgggatagtacgtttaatcaatgccgcgttacgttcaaggatcgcgcgggcgattacgacgacagcgtagccattgcccaagacttcgcaaatatcaactatcaacagcgcgtcaaatctaccgaaatttcttcgccgggttgtacgactgccgaagttgcaaacaagcttgcagcgcgtcaactttcgttgattagcgttccgctgtataagtgcgacattacttgcaatcgcaaggcttcgacgcttcgtccgggcgacgtgttcgttctgaattgggggccgttcaacctgcaaaaaatggtcatgcgagtttcgaaaatcgaccttggcgaacttacgtcgggggaagtgaaaatttcttgcgttcaagaccgattcgctacggcgacacctacgtttgcgccgcctgattcttcgaactggacgccgattaacacaagcgcaaatgccgtgacggtgcgtaacttctttacgccgccgcacttcttggcgcgcgtttctccgaacgaagccctttcgacgttcgacagtcaaggccggttgtatatcttggccaaggggccgtcgtccgcttctatttcgttcgatgctatgttcagcggcgataacttcgctaccgatcccacactagccattgaagccgccccgtacaatggcggcggcacgctgtcggccgcatatgcgaatacagttgcggcagatacgcgacacgacacgacaggcgtattcaaagtgcaaggcgtatcgtcggcagatattgcgaacttgcagcaatatacgacgcttgaccaagcgcgcgacggttccgcgttgcttatggtcaataacgaactgttcgtttatgtcggcttcgttgacaacggcgacggttccgttactttcccgaacctgtatcgcggcgttctggataccgcaccggcaagccatgcggcgggcgaccgtgtttggttcgttggcggtatcgacggtttgattccgcagcttgtcaacaacagtgcgaccgggtacgttaagctgttggatacgacgacttcggacaagttgccgctgtcgtctgccccgaccgtatccgccgcgcagaatggccgcgcacgcctgccataccagccgcagaaccttacccttgacggtagccgtacccctgccccggccacgggcgcaacgtcgatcacggcggcatgggcacgccgcagccgcgaagcgcaagccctgtccgtcttcaacgatccagacgccgggctagaaaccgggacgcaaacgcgcgtgcggtggcgtgttggcggtggcggatatactacggtcatggtttccggcacttcgacggcgcttaacgtaaccggccttgtcggtacgttggaagttatcgtagatacgcaaatcacggcaagcgggctgttcagtacgaacagcgaacgcttgaccatgacgctatcttaaaagaacgcaagttcgccgttcttggctttcttcaaacgtccgcagtcgtacagcatttcgaccgcttcgttaatgtaccagtcgtaatttatatcgtcgggaaattcggtcggcaagtccattacaggacgcgcgccgtccgttttcccgactttgtttccgctggcaacgtaagcgatatgcccggcttcgttcttcgggtaataccagcgaacgaccttgcccaagaaacgcccgttcttttcgccgccgccgtgaacattcttcacgcatacgaagcgccggaagtcgcggcattccttaatcgtcttttctaccggcgttccttcgacaaggaaccgaataacagcgtcggaacataccaaagcttcggggttcttcgacagaatcgaattaagcgcggaaccgcgttcacaataagcgcccttcgtcttagcgcctaatttttcatccaagaagcgcgcttcggcgtcgccgccgtcgtccttgattgcgacatagctattcacgtcgcgggaatatacggccttgtatcgcgtttcttcggtcttgtatcccgtatgcgcttcccatgctgcaatcaagttgcggacttcttcatgccgcgacttgtgatatttcgaaatgaagccgtccgtattgccggaaatgacttcgacgccgattccttcgattgcttcgataagcataagcaatacaagctgtccggtaatcgtaacttgcaacataagttgcggcgcatacagcgttgaatatttgttaccaagcttgccgaagcttccgttaatcgtaatcttcaagctgtcggcaattaccttccatttcttcgcgcctttgcggtcgccttctttcttgcacttcgccgccatcgccttagcgtgaattcgcgtttcgacgatcttgttataaaccgtcaagaaagcttcgcccaagtgcggcgggaacagcttttgattaagaattgtgcgcggatagaacgattctacgtcgttatccgctagaataatgtcttcggttgcgacgtgcgcggtcttcttttctgtcgaatgaaggccgcccattccaagtttgtacgtcgatttgccgatagttactttcagcttttcaatttcggtcggcatgatgggcgaacccaagccgtccagatagaacgccgcgccgcgcacgacttctagcatttgctgtaactgcggcgtctggaaacaaacgaagtccggtacgttgtaatacaacgggccatcgtctgttagtgtgggcttcttcggatagtaacccaacaccttttcaagttctttattgattaccgcttcggctacctgcgcatcggatttcgaccgaagttctacgccgtattcttccgacatttcggcccgcaacttcaattcgggcgcaagttcgttgaacagaagttcggtattcgcaaggtcgttgcagcagtacgggcgaacgattgcggcatcttcgcgcgtcaatacgtgcgtttcaggaaatggcaagtcctgcatacgttcgcaatgcagccgaccggcgtacagcttcaacgacgccgggcgcgcagtaacgccgccgttcaccgggcaaacgttgaacaagtcgatatggttgtagcggccaatttgtacgccgtatttcttttcgaagtcgaacggcgtaaccttcttcgtaccgtaggccgggccgcttttaatgatgaagtccgaagcttctttaagcttggcgcacgatgcaccgcgcgccgcaagttcgatcataggcaagtcatacgatgcgctgttgaagcccacaatacagaatcgccaaagcatccaaagaagcttcgtcgggttaaagtcatggtcgggcgaacgttcaaacgcgacgaactttccggtatcaagcgacttaaacgcgacataccaaaagttgatatacgtttcaacgtcaaagacgaagacgcttccagcgggaagcgccattagttcttcgtccgacatgaattcgacaggccgcaaagcatggcgaatgcttgcggccaacttatcgacgacgcggcttttcttggcaacgatgaagccttgttcgttcaacatatgacagccccttagaacggtatatcgtccgaatacggatcatccgaagttcggttaatgtacgtatcttccgactgttcagtatacgacgcttcggttccaaggtcaagccccataactgcgccgcgcacgttgtcgccgtagaaaattactttgttcgtttcggcgtcgaaatgcgctttcttgaatgcgtgttcaacggaaagcaaaagctttgcactgaatcccattcgttccggcaagccttcgatacgatacgtcgaagcttcttctttgtgcatacgcgacaataccgcgccatcttcgaagaaaacatggccgttcggactgaacgattcgatagcacgaacgccccggtaaaagtcttcgggaatcggccaaaggttcaaattcggaacgtccagaaccgaagcgtaattcgggtaacgttcgccgtaaagctgcgacttgataaacgaaccgtcttcgaaatagaacgttgccgacgactgcgaatagccgaacccggtaagtgccttcgatgccttcgcaatggccgacgctgcggccttcggaagcataaggccgggcggaaggtcgatgccgtgccacgcttccagcagggccgccccgttcgtcgctacggcgcttccagcttgcagcaggacggcggcataggtcgcattcggcgcgccgtccgttgccagccctgcgaccgcagccaaggccgctttaacccggtcgtcgatcacggcgcattgcggatcgggcggcatgatgggcacttcgtcgaacgctacgcacggcacaagcgcccggaatacgccagacgatacggcaagcgtgttcgctgtaagttgcgtaatcgacaattcgtcgccagccttcgacagtgcgtcgataaactgcaacgtatgcgggcacgcggtcaagtcttcttcaatcggcgcggccacggtcaagacgccatcgaaggccgccgcccaattgtgggcaatgtggccgaactggatatttaccggcccggccttcttctgcgcaaccgaaataaacttcaatgctgcgataagcgaagcggcggggttcgccgtcttcttcgctgtcgtaccttcggcttgcttgcgggcgcggcttttgcgcttcggcttttccggcgttgcaggaatcggaacgtcgttttcaatttgcgttgtcatagtttcaccattcagcggaaagaacttcgggatacttcttgttcacccaaacgcgaagccttgcgggcgttcgaagttcggatacacgttgtaaagcttgatacgtcgtcggcggcggttcttcgcggtgccgctgtcgccaccaatcccgcgaacgtttcgccgcaagtccggggtgttcaagcatcacaaattcgttaaacatttggaagccgcaaaagtacgatactttaatcatcggcggctttgtcaagttgccttgtgcgtcgcgtttttcgtgaaggttgtatatcaccttttgtacgtcgaaatattcgactatcggggcatcgctgcgcaacggttcggcgacgcccggcgttgcaaacaacttcgtttcgaagctgaattcggcaccgcagttaatgcactggcgcgcggcggcatgattgtatacgccgcaaacttcgcaaatacgaaccggcgcgtcgccgccacctttgccggggcgattcggaatacgcgggtcgttgatcgggccaagccgacgaatgttcgccgcgaagtcgccgacaagacaattcatcttgccagtttcgggacttgggcgcgttccgcgtccgtacttctgtacgtgtttgcccggcgataacgtcgggttcaaatcgccgatgaagtcgattgccggatggtcgaagcctgttgtaagtttctggccggatacgataccgcgaagttcgcccgctttgaatgcgcgcaaacgttcggtattaaccttgtctttcaacttcgaatgcacgggcaacacttccagcccgtaggactgaattacgtttgcgacgtgttccgtattgtcaatgccagttgcgaagacaagccaagtcgaacggttatacgccatttccatcatttcgcggacggcgttaaatactacgtcgtcatcgtctgcggctttttcaagttgcttcgaattgaattcgccgccgattacgccaacgcctgaaatgtcaatttcggttttcgtcgggcgcgcaataagcggcgacaagtaaccttcggcaatcaaacgattaaacgattcaacgccggtaatgtcgtaacaaatatcggtgaatattccgttatcggtaatcatgcccattttcatacgatagggcgttgcggtgaatccgataactttaagatgcgggttaatcgcgcgcaattcggcgataatgtactgatagaacgaatcttctttgtccgaaagcaaatggcattcgtcaatcaacagcaagtcacgccatccgaaatggcgaagatgcggcgggcgtccgtcgttctgttcaagcgcctttttaatcgccggggctacggattgaacgccgccgaatacgataggcataatcatttcgcggctgttcaagcctgcggaatagatgccaaggggcgcagtcggccagaccgacattaacttttcggcgttttgttcgatcaactctttaacgtgcgtcaacatcattattcgctgattcggccaaagtccgaaaatgcgacgaatgaagttagcaattacaacagatttgccggttccggtcggcatagcgacgaccggatttccgacgtttccgcgctggaaatagtcgaagattgaatattcggcttcgtcctgataccagcgcggtacgtagatactagacattttgcgttgtcgccgtgataggtacgtaagacgggcaagcctgcggtacgaagtcgcgggggattacgccgttatgtacgtcgcaaaaccattcgccattttcgaccggacgggccgccttgcagctacgacaattcttttcaggaatcgcgcctttgtggcaaatgtccttcgccgcgcaatacgtgcaatccttgaacgtcggattatcggaaagacgcggcggcggttcctgcgacagaatgatttgttcggccttttcccgcatttgctggcctaaccgatgatctaacttcacaagttcgacgtgtaacgaatcgtcgttcttgttaatgttgaagtacagtacgtaacggaatccgtatgccgcgtcgcttccatacgttgaagtttggcaaaaatgctgcggcttcgcaacaggcataccggcttcgccaagcttgttaaagcctgcgccggttccgttcgtcttgaattccagcaatacaggttcgtcgattccgtagcgcgccggaagctttgcgataccgtcaagcgatccgccgaaatgcccattcaccgccgacacgcggtattgtgggaattccaagccgtccgccttcgcgcgtgcgacgtgttgcgtatagtacggatgttccttcgtaattggtgacgaaaggccgtcgccttcttcgccgggcttcgcaatccaatacgaatcgctttcggcgtgatacataaggccgtcgcggttttcgtaccaaacttcggccccgatgccttccagccattcaataaagcgggcttcttcacgatgcccacgattaaacagccgttgcttgcgtccgtccgtctgttcgcggaacgtccagcggaacagataccaaagcttgcgcttgcagccgtcgcctatcaacgacgcgccaaggtgccagcggtggccgccgtcataagtacgaacgcaatattcgtctatgtcttcaaggatgcgcttagaaagcgccttcgctacgccgggcgcgtcaagtgcgacgttttgttttccggcgtcgggcttcgtcgctggcgcgtcgttcagcgttaattgcgcgttcggttcgcttttcttgcttggcatcgttcttcacctttcgccggacaagtgcggcgtaattgttcgttagatagtcggcggaaagcgtcgcaacgtctttaagttgatccttcgataaccaactgatatggcattcggaagcgtctatgccaagttgcgccgcaagccaattgtacgccttcgaccgtgacattaagccagtttgccaaagacggtcgaattcgtcatgcgcttttgttcgaagctgtcgcgtagcacggtcggccatacgaccaagcggaacaaacgtgccggggtgacagccaacagcggcgcgacagtcgttgcaaaaataaatatgcggccaatcgccgtaacggcgaccgtaaatccggtcgtttgttgttagttcgatgttgaatgaacaacaggtatcgcattgttcaggtacgggcaatgcgtctttgattttcgacatacttacgcttttccccataaaagaacgccggggccggtaaaagccccggcgatgttacgccgctacgctagttcgtcttagcgtgcgccccaaggtgcggcaccgccagccggtgcgccgccctgcggttgctgctgccagccgcccggctgtccgccctgcggggccgcgttctgctgcggctgctggccgccccaagctgcgccgttgccctgcggctgctgcggctgctgttggggctgctggccccatgccgcgccgccttgggccggttgctgctgcgcgggctgctgctggccctgcggctggccgccccatgcgccgccctgcgcgggctgttgctgcggctgttgaccgaagccgccttggccctgcggctgctgtccgaagcctgcggcggcctgctgcggctgcgccggggctgcgccctgtccggccttgcccggttcgttgccgttcatgtcgaacacctttttaacttcggtgtactgcgggtcgttcttctgcggcccgacttcgataaggaacgggattccgtgaagctgcgacgaatcgttgatttggaacacgccgataacgtggcagactgcggacaactggcggtgcgcgatttcgaccgtctgttggttcgtatggtacaggttcaggcgatacgcgccggtcgtgccagcctgcgggccgtcgataatccgcaagttcagttgcagatagccgccgtcgttcgccttgttcgccttgacttcggacgattccacgataaccggatgcttgccgatgggcaggcttccgacgccttgggtcgggtcgtattgctgcgcgttgaaaggttgaatcagttgcatggtatttaccttttcgaaaagtcttcgccgttggttacggtggcaaagttaccgtttttggctgcgccggtaggattcgaacctacgaatgccggaatcaaaatccggtgccttaccgcttggcgacggcgcaaaagcttattgcatcgctttcgtgaaaagcgccgacaaatcgggcggttcaagttcgcccaagttgcccaaacgatcacgcgcgaacacttcgggaatttccttcgtccgcaacgcccgaaccggcttcggctggcccggtacgatagcttcgcccaagtgcaacacgttgtcgaacaggtgcggaacctttacgttaaggtctttgccggggaagaacggtcgcttttgcatgatcggttcgtatacgacttcgccgccctgcaagatggtttgccgtccgttttccatgacgccttgtttcgcaatcattacgatatgcttttgcggcatgtaatacaagtcgttgcaaatcttcatcgtgcgttcggacatattgccgtatgccttcatgccgtgtttgaccttcgacagttcttcggccaagataatttcggcaatgttcgaaatactgtcaatgcccaaggtatcgaagttcgcggcttcgcgtgacttcataaaccattcgaagaattcggtaataagcggcggggaatacgcttcccatgcgggcacgttcgaaccgcgcatagacaacatgccgggttcagttaccaacagcacggggcgcggcgcggtgttgataagcggcgtcttgcccgaaccgggcgaaccgaatacgacggactttacgccatagcgtcgggccagttgcgacgccggtttaagctgcgacatttgcattttgtttactccgattaaagcggcattattgacgacgccgacgctttcgctttcccgactgtccgttatggcactatgcgacgcgatgcgcggcccggactttcgatgccgtcaagaatgccgccttgattgtgggcaaggcggcaagtgcgttacttcttcgccttcggttccttgatttcaagggtcggcgtaccttccgacgtaacgataacgtcgtcaatgatcttgcggaagttgtcgggcagttgcttgtattcggtaagcgaaagttccggcgtccacttaaccaaacgttcggcgatcaattcgccagcctgtccggtcttttcgatcttcgacaacgccttttcaatgcgcgccttgtcggtcttgccttcggcgttctggatgaagccgtagcgaaccggaaccttcatcgtcgctttgtagccgccgccaagttcgacattttcggtcgtgctggacttcgccgggtcgtgcatgaacatcacggccagcttgcgggcttccaattcggcttctttggcgacttcaagcgcggccttcttcgcttgccaatcgaccaacagacggtcgcgttcggcgatatattcggcttcgctgtagttcttgatttcgcccgtttccgggttcgttacctgaatgatattcggggtcatctttgcacctttcttcgttgggccgccgcacgttgcgccggtatgtgcttaatgtacgacggcccgtttcggttgtcaagccttttgttcaagaatttttcgttcttcgaacaagtcccgattgttcgcgtcgtgttcggtgaacttctgcgggaaccgcttacgaagcttggcgatgttcacggcctgcgcttcgccgaagttcgaaccgatagcgcgaagcaacagcgcatcgtaccaaaagccgtcgccgacttcttcaagcgcgttcacgtcgtcgaatacggcaccttcggcggtcgccgacagggcttccagcagttcgcccgcttcggtcgctttgccgatgatcgcatgaacgatattgacggcgcgcgcgttggcttcgtcggtgccatcggtggcgatccaatcgggcagcttggcaagcgtgccggtgttgtcgccgggggcgggaacgccgcagtcgcggccatagaaaagcgtcttcttgatcgcgtccagcttcaccagtgcggcgacagcttcggcgatggtttcgcggaagtagccaagcgacacgcggtcgccgtgatagctacccgacgcggttacgtgcgcttcttcgatatagtcgaaggtcttttcgggttctttcattgcttgcacctttcaaagtcgccgggcaccgcgccgcagcgttccgacactgtagcgccgggcatgttgcctgtcaacaaaattttgtcttgcctgctagaattttgtcgggtatagtgtcgttcatcttgcccacattgaaccgccgacatggtgaaaacatggccgaagttaccaaactgcgggatgaaacccgcgaactgttgttgaaccgcccggcgtcgatagacgttggcaccattgcggaagccatcggcgtttcgaagtcttgggttaattcctttgcgcgcggcgacataccgaaccccggcgtcgtcacgattgaaacccttaacgcttttttgaagaagtgcgcgaagaaggcgaattaagaatgtatcaaaacatacctatcgaaatgcggacatatccgcaatgggttatgtggcggtacgaagacacggattcgaagaaacctactaaggttccgtattctgcccgtaccggcgcactagccagcgttaccgattcgaacacttggggaacatttgacgaatgtttgcacgcgcttaattccggctggtataacggaatcgggttcgtgttgaccgacgccgacccgtattcgtttatcgaccttgacgacacgaaaggcgatcaaacggcgcttgatcgtcaaatcaaaatctacaacgaattcgacagctacgccgaacgttcgccgtccggttcggggctgcatatcatcgtaaagggcgcggttcccgctggccggcgtcggtcgtttattgaagtgtattcgtcgcttcgttatatgaccatgacgggcgacgtttaccgcaatgcgccaatcaaagaacaaaacgaactgttgaacattctttggggccaaatggggcaaggttctgtcgccgttgcgcattacgcaggcgtcgccgaagccaaggaaaccgacgaacaggtttataaccgtgccgtcgccgcagccaacggggataagttcgccgaactgttcgcgggtaaatgggaaggcatgtacgcttcgcagtccgaagccgacttcgcattggtcgatattatcgcgttctatacgcagaaccgggcgcagattgcccgcatgttcagactgtccggcttgggccagcgcgacaaggcgaagcgtgacgattacgtatcgtacatgctgaacaaatgtttcgaccgcatgttgccgcccgttgatattgacggattgaaaaacaagcttgacgaagcaatagccgcaaaagaagcccgcgaccgtgccgaagccgcatcgttgaacagcaacgtaccgcaagcgccaatcgtcgcgccatccattcccgaaacgtcgaaggtgtattcagtgccgcccggacttgtcggcgaaatcgcccaatatatctacgcacaagcgccccgcccggttcccgaaatcgcattggctggcgcgcttggtcttgtcgctggcatcgtaggccgtgcgtacaatatcagcggcaccggccttaatcagtacgtattgctgttggcacctaccggaacaggtaaagaagccatcgcatccggcattgataagctaatggcgcaggtaatccgcaccgtaccggctgcaagcgacttcatcggccccggcgaaatcgcgtcggcacaagcgatcattaaatatatgtcgaaggggccaacgtcgttcgtatcgttggtcggcgaattcggcatctatcttcaacaaatggcaagcttgaacgcgccgccgcatcttttgggactgcgccgtttcatgctggacgcttacaacaaatccggcgaaggcaaggttcttcgtccgtccatctattcggacaaggacaagaacactaccgcagttcttgcgccgtcgttttcgttgcttggcgaatcaacgcccgaaaagttttacgaaggcttgcacgaaggtttgattaccgaaggtcttttgccgcgttttacgatgattgaatatcatggtcaagtgccgccgttgaacaaagccggggcgcgcgtgcaaccgtcgttcgaacttatcgaccgtctttcgacgctttgcgcgcattcgcttatgttgaacagccaacataaagcgatccatgttcaatttgccgaaggcgtcgaacaagcttccgacaagttcgaagaacattgccgcaacaacgtaaacagtagcgaccgcgacgttaagcgccaactttggtcgcgcgcccatatgaaggcgttaaagctggccggtatcgtagcagttggcaataacccatatgaccccgttattacgtcggacgttctgtcatgggcgaccggcgtaatcgttgcagacgtgcgcaacttgcttgcacgcttcgacgctggcgaaattggcgtagacaacgacgaaacgaaacagcttgctaaggtaattgcgacggttaaagatttcgtcgtatcgccttggccggaagttgcgaagtatgcaggcgaaggcgcaagcaacttgcattcgaaccgcattgttccgtatagctacgtacagcgtcggcttgccgccgtatcggtcttccgtaaagatcgcatcggcgcatctggcgcaatcaagcgcgcattaaagacgctatgcgaacggggcgacctgcaagaagtgtcgcgggctacgctgtcgaaggactacggaacgtccgccgtcgcgtacatgatcgcgcatcccggcgttttcggcctgtagcggggccgggatagtgtgggcagaactggccgccttcgggcggctttttcatgcctgaacgaaagtttaacgtatttcccgacgaacggtcgaaaagttgttgacgaagcttcgaagtcggcgtagtattcaatccatcgaagcaacgaacccgacgaaggagttacgaacatggctaacatcatcgcagaacttaccgcccgcatcgaagaataccgcaaggacaataagaacccttgcaagaactacggcaccgaagccgccgccgaaaaggcaaccgcgaaggccgccgctaacatcggcaattattttgccaaaaccggcgaaggcaagcccgcccgttacgtcgtgttctacgtcgaagcttggggccgttgggtcggttgcattgaactgtcggaaaccctgcgccgtcccgaatcgaccgggggttatcttggcgtcgaacccggcttcttcaagttctaacgaacctgcggcccttggcatcgcgctaggggccgcgcagcctgcccacattaacgaaaggtgccagctatggaaatccgcatagacaacgtgaacgaagttctagccgcaatcggcttgaccggacagcacgaacgcaagggccaaggctggcaccgcgtttacattcacgccccgcaagaaggaaccgacgtaacgttgtaccttggccgcgtcatgtttcaacatggcgtattccaatgggtgaaatggtgcgtaccgccgaacgaaggcgaattgcaggattacgacgtatattggttccgttgggccgtatacaccgcaaccggcaagcatctagggccgaagtcttgggcgcggttgaaggccaaggcgcaggaacgcgcgcaggccaagcgcgacgccgccaaggccgcacgggacgccctgaacgccgacagggtagccgcaggcaagaagccacggacgcgcgccctagcgcctgtcaatccgcgccgtgcggcgtgcatgatcgtcggcgaatggctgtccgctgaacttggccgcgaagttcatttgttcgcattctaacgaaggagttatcgaaatgaccgcatttattgtcgcgctttgcgcatcgttggcgctggcgttctggcgtctggccgctactgcattcgaagccgcttactactgcgcaaagaacggtgaacgttcgaaagcatggcgcttcattcttcgcggcatcttctgcgcgttttggctttcgctaatgattgcgcccgtcgttcgtttcttcgatagcttcgacgtgattagtatagacgaagcgccgcctatggttgcgccgaagcgttcgacagaccttcgcgtataatagacgacgatccgtttaacggtgccgtataacacgcaaagccttgatacgcctagctttcagggcatttataacaagtataacggtataacgccccggcaccgaatcccccgccctattgataaatagtcactttcaataaatagctatattttaggtattatacttattatattttttatattttctttaatttcaaggacttagaagctatacgaccccttcaatccgtataacgggtgactttcaataaaaagcttgacaattgataaaaggccgggtacgctagggctgtttataaattggagtgcgaaccatgaccgaagctaagaagtacgacgtaatcgacgcatcaccgaaggcgctatcgcattgcgtcgccgaagaagtgaagcaaggcgaacgcgacgtaagcgaagcgaacgcgaagtatccgtttaagtcgctgcgcgtcggcgaatccttcgcaattccgttcgacgacatggggccgggcacgctgcaaagcgtccgcagttcggccagcctgaacggcaagaagcttcaacgtaaattcaagatcattacgcatgacgattaccgttgcgtcgaagtcgcgcggatcaagtaagccgggccaatgtgggcaataaccgaaggggcaaccgatgaacaagattgcacaagcatttgaccgcctgaacgaagcaacgaagggcgcaaccgaagcaatgcagaatttcaccgcagcttatgcggtcgaagacgggcacaagatgccgaaggcgcgtcgcaaggctggaagcgaaccgccagcggtgaagaccgcatttaacgaatacgccgacgcatacaaagccgtttacggcgtgcgtccgttgtcgtatacttacgacgtagcgacgaagtttattcgcatcgaaaacagcggcggcgtaagcctgtcgcgtttgcgcgaaatgacgaagcaacttcgttaccgtaaaggttgacagcttcgaagtttcatcgtagtatgaccatgcgaaccgggcgcttcccggcaattgaaaggagttaacgaaatgtgcatcgtttgtgacattaagcgcatgaacccgtcgcccgaagttatggcgaaggtcgaagaactggcgcgcggtctggataccgctttgaccgtggcgcaagaagtcgccgaagcgaaccccggcgcgttcaacgatgaacagcgcgaccgtatgcagtccgccgccgacctgctgaatcagcgcgaaggcggcatcggcgggcttgccgcgatccttgcggccatccttggcggtgcgcgtgttgaagttgcgcacgttgaattgcgcgacggcgaaagccccgaagatgccgtagaacgctacatggccgaaaagaaggccgaagcgtcgaagaacgaaactaagtattgaccgaaagccccggctagtgtatagtcggggcttcttcgtaggggaacgaaaccaacatggccgacgaaatagacgcaacagccgaccgcatggacaacgaactagcgttgaccatcgctaacacttgccgcattgccgccgcgattccgaaaggctatcccggcgaatgcttcttttgtggcgaagacttcgcccgcgttgtcgaagtgaccgacccgcgcagcggcgaacgtgtcgattcctgcgggcgctgtcgtgacgcaaggggcataaaatgacaccgaacaaactagcgaaagaatccgaacattcgcaacaggtcgcattgttcgcatacgtagctgtcgcgtatcttcacggcttcgacgtagccgacgaatggtgcaagactggcaagctaccgaagcgcgatccgaacgcaccgcccgccgtcccggcgcttgaatggttccacgcgatcccgaacggcggtagccgtggcgacgacgaacagtcgcgcaagatacgcggcggccagatgaaggccgaaggcgcacggcagggcatcgccgatacgttcttgccttggccggtctacgaacaaagcccgaccgattcgcaacaaatggtcgtaaaatggtgcgggctttatattgaaatgaagaagccttcgcttcgcccgaagtctgccgaagccaaaggcggcgcatcggacgaacaaatagccttcggccagtacgcgcagcgcgtcggctatgggtgggccgtgtgctatgattgggaacaggccgttagctatcttcgtagctatatcgaatggggttcgaaatgaacgacaaaccgataaccgaaaagttccgcgacttcgtgaaagaagacgggccgcgcatcttcgaagaaatcaaggccaatcgggcgaagttggaagcgtgcccgaaacatcatttcaacatcggcgacccgccgtataagttcggtgcgaagttcacttgcacgaactgcggcggcacaatggacgcggtacaggcgttccgctattgccaaggctacgaagcggcgggcggcgacccgaacgaagttatcgaaggcttccgctaatggattgcctgaaatgcgaactaacccgcgcgaagcttaaaacggctggcctgctaattgtgggctggccgttgtcgcgtatagctgaacacctttccgactgctacggcgaacggtactacgtcgaaggcgacaagctataccgggcgtcgaagcttccgccgtatgaaccgcacttgataaggagtaacgaaaatgacacttgacgaagccaagaagaaggcacgcgaaaaccgttgcttcatcgtaacgaaacctgaatattttttgctttaccgtgaatcaacgccgaagaacgtatgcgtcggcaaacggaaggacgaaaaaggcatcatcgcgctagtgaaaaaagcttgcgcgaccgcttgacgtagcttcgaaaccgtcgtagactatgcccatagtcaacgaacaaggggcacgaaatgggcgcatacaccgtaacaactgaattcgaaatgaacgacggtcgcattctgtcgtgcgaatacggcgtatcgttcacgccgggcaactattccggtctgcccgaaaactgctaccccgacgaaagcg

SEQ ID NO: 19 - DNA, 43741 bp, unidentified
  misc_feature 1..43741: note = the genomic sequence of a bacteriophage
  source 1..43741: mol_type = unassigned DNA
acacaagcgccgaagatcacgtttacgacatggtgcgttatcgtgtattgaaaggcgcgaacaaagcggctacgaaagtcaaagtatcaatgccaacttaaaggaatcgaaatcatgccgaacgtatcttttgtgcgtcctgaactgtcgaagttgcttcccatgtactaccttattcgggacgcaatcgcaggcgaaccaacggttaaagaagcgcggacgaaatatcttccaatgccgaacgcttccgaccaatcgaaggaaaacaaggcgcgttatgatgcgtatatcgcgcgggccgtgttttacaacgtagcccgtcgaaccctgttcggtcttatcggacaggtgtttatgcgcgatccggtcgtaaaggttccggcgctgttgaacccgcttgtcgcaaatgcgaccggatcgggcattaaccttacgcagctttcgaagaaggccgtatcgctgaacttggcgtattcgcgcgcgggaatcttggtcgattatccgacgaccgaaggacagggcggcgcgtcggttgctgaactggaagcgggcaagattcgcccgacgctgtacgtctacgcgccgacagaaattatcaattggcgaacgattgatcgcggcgcggaagaagttttgtcgttggtcgttatcttcgaaacgtggtgcgttcaagatgacggcttcgaaatgaagaacagcggtcaattccgcgttttgcgtttggacgacgaaggttattacgtccatgaaatttggcgcgaaccgaacccgaccaaggcggacggtacgaagattccgcgcggcaattaccaacttcacgaagtattcaagccgaccgatgcgaacgggaatcgtcttgacgaaatcccgtttatgttcatgggttccgaaaacaacgacgttaaccctgataacccgaacttctacgaccttgcgtcgctgaacttggcgcattatcgcaacagcgcggattacgaagaatcgtgctacgtcgtaggccagccgacgcccgtacttaccggcctaacggaagaatgggttaataacgttctgaaaggaacggtcaacttcggatcgcgcggcggcattccgcttccgaccggggccgacgcaaagctgttgcaggccgaacctaacaccatgcttaaagaagcaatggacacgaaagaacgccaaatggtcgcacttggcgcaaagcttgtcgaacagaaagaagtacaacgcaccgcaaccgaagccgaattggaagcggcgtcggaaggttctacgctgtcaactgcaacgaagaacgttagcgccgcgttcgaatgggcgttgaaatgggcggcccgttggatcggtgcgggcgacgctggcgttaagttcgaactgaatacagatttcgatattgcccgcatgacaccggacgaacgccgccagattatcgaagaatggcagaagggcgcaattacctttaccgaaatgcgtacagggcttcggaaggctggcattgcaaccgaagacgacgcgaaggcgaaggccgacattgccaaggataccgccgaagcgatggcccttgccatgccggacaacgtaccgggcgacggcaacacgcccccggctggtaatgtgggcaacgggggtgcgtaatcatggcgctatcagataacaagcgcctgtacgacatttcaacgcggcttgccgtatatgtcgaaggcgttaaagttcagcagtcccgccaattcaacttcgtattgcgcgatattagcgaagttctgaaaaagcttcttggtcgtgttcgttacaagacccttgacggtctttctaaggcgcaactaaataagcttgtcgcagaactgcgcgaatcgcaatcgaagatttacagcgcgtacacgtcgcagcttattgaacagcttaaagcgttcatggctgcggacttggaagtaaaccgccgcgcatgggttacgggatatatcgaacttgacggcgattcgccggacgaaatcatttcggacgaagacgcaatacagttcttaattgaagccaacgacagcggcgcaaatccgctgttcggcatcgcggccattactggcggcgacgaacgtatttggtcgcaagttacgaattcgccgcttccggcgaacgggctttatcttctgccgtttatcaagacgtttacaacgtcggcgcaagcgtcaattgaaagcatcattcgcaaggcatgggcgaatcgctggactgttgacgaaactttgcgcgaaatcatcggcgaagaaggcgcacgccaaggcacgccgtcgcagcttgcgcggatcaataatcaagccgcgtcggttattcatactgcctttgcgcatactgcggcaatcgtagcggctggcgtagcgtctgcggtttttagttggtacgtttggttttcggttatggatggcaacacgaccgaagtttgccgaagccgcaatcggaagcgttatcggtttggggccgggccgttgccgcctgcgcacattcgttgccggtcgcatactgccccggcgaatacggctagtgacctaatcgacgaaacgttttatacttggcttgcgcgtcaaccgctggaagtgcaagacgacatattaggcaccgaaggcggcgaagctttacgcgatggcaaattgaaagcttctgatattccgaagtacgaagccgacgaaccgctaacgcttgacgaattccgacgcaagattaaacagattctttcccgctgatacggtgtatcggcataacctgtaggagtcctacgaaatggcactgaaaaagcgtattaccaaagaagaacattcgaagcttaccgacgcgctgaaattcgaatatgtcgaagacggcgacggtttccgtctggacgttgatggcgacgaagacaccggcccgcttcgccgcgcgaaagaccgtgaagcgcagttgcgccgcgatgctgaaaagagggccaaagaagccgaagaccgtttggccgaactggaaggcgacgacgcccgcaaaaagggcgacattgctacgcttgaaaagtcgtggcaaaagaagcttgacgatcaaaagaacgaatacgaaggcaagatcggaaagcttacgacccatacgacgaaatcgcttgtcgataacgtcgcgctttccatcgcaaccaaaatcagcaacgcacccgcgattatccttccccacattcgggcgcgtctgcaagcggacttcgaaggcgacgaaccgaagacccgtattcttgacaaggacggcaagccttcggcaatgaccatcgacgaactgtcggcggaatttgttgcaaacaaggatttttctgctatcatcaccggcagtaaggcgtccggcggtgccggtaagccttcgcaaaacggcggcggtgccccgaagaatcccggtcaatccgacaaacccgccgacctttcgaagatgaatccgcaagaacttgcggcgcatctgaaagaagcgaaggctactactgaataaggacgctttatcatggcactttccgacctcgcggtttactccgaatacgcctattcttcgttctccgaagtcctgcggcagcaaatcgacctgttcaacgctgcaacgggcggcgcgatcatccttcaaggtgcggcgcaccaaggcgactttagcgacgtggcgtttttcgccaaggttgcgggcggccttgtccgtcgtcgtaacgcctacggttccggcgctgtcgccgaaaaggtgatgaaacaccttgtcgatacttcggtgaaggttgcggcaggtacgcccccgattcgccttgaccccggccaattccgttggattcagcagaacccggaagtcgcgggcgctgcgatgggccaacagcttgccgtcgatacgatggccgacatgctgaataccggccttggcgcgacctacgccgcgcttacgcaggttgcggcggtcaagtacgacgctaccggcaacgccgcgccggacgacggcccgacgtggaacaacctgaacaacggccaagcgaagttcggcgaccaatcgtcgcagattgcggcatggatcatgcacagcacgcccatgcacaagctgtacggtaacaacctgaacaactccgaacgcctgttcacctacggcaccgtcaacgtgattcgtgatccgttcggcaagctgctggtgatgaccgacagtccgaacctgtttgcggcgggtacgccgaacgtctatcacattcttggccttgtgccgggtgcggtgatgatcggccagaacaacgacttcgacgcgatggaagaaggcaagaccggcgacgaaaacctgattcgggtttaccaagccgaatggtcgtacaacgtcggtgttcgcggcttcgcatgggacaagggcaacggcggcaagtcgccgaccgacgcggccctgttcacttcgacgaattgggatcgctacgccacgtccgaaaaggatttggcgggcgtgatcgtcgaagttcactaaccaacgaacgaacgggcggggcttcggccccgttcgtttagtcctttaaatcattcggagaaatacgaatgaacatcggagataatgcaatgaagcctgcaaaaattctgtacttcgtcgatggtccggccccgacccccgaagatttcgccgcagccgccgaactgaacgcaagcgtttcgttccgcaacgcacgcgccgtaccgtccgaagcgcattcgctggaaatctgcgacggcgtggcgggcgcagttccgccgatctacgccgaaaagttccccgacgccgccgaagctatcaagaagaaggccgccgaactgaaagaacttacttcgaaggtcggcgacagcccggcaccgaaggccaagggcggcaagaccggccagcaagcgccgcagcagccgcagaccccggcccctgcaactggcggccagcagcccgcagcgggccagcaaggcggcggcgcgccgtcgtggaacccgaacccggcgcagtaaggccgggcgcagcgtagggcgcggcctgttcgcctagtgtgggcaggccgtttttataggcgcaacgaaaggacaaacgaacatggccgcgaaaaaggttattttcttcaccgcaggcactaccccgacttctggcgaactggccgcaattgcgaagctgaacgcagccgccgacaagccttacgaagttaccgttatgaacggcgcagcgaataccaagtacggcgaaacgaaccgtcttgccccgtgcgacttcgtagcgggcatcgtgccgacgatctacaacgccaagaccgtaattaacccggatgcgatcccggttcaaaacctgccgaatacgcaggcggtcgtaacgaacggccagaagattaccggcgttaccggaagcggcaccgtcgcaaacatcgtcgttaacccgacgaccaaagccgtaaccgtcacgctttcggcttcgtaaggattcggcatcatggcaattactatcgtagttgaagacggaagcggcgtagccaacgcgaacagttacgtaagcgtcgcggatgcgcgcgtatacgcgaccaatcggggcaccgaacttccgtccgatgacgacgaagtagccgcgatgctgattcgtgcgacggactacctagaagcgcaggaatgccggtatcaaggcaaacgcacgtcgccgacgcaggcgcttgcgtggccgcgtaccggcgtattcctgaattgcgatgaagtcccgtcgaacgttattccgaaatcgcttatcgccgcacaaacgcaattggcgatggcgattaacgcaggcttcgacctgcaaccgaacatttcgccgcaggactacgtaacgcgcgaaaaggtcggcccaatcgaaacggaatacgccgacccggtagccgttggcatcatgcccacgtttaccgcagcgaacgcgcttcttgcgccgctgttcggcgaatgcgcttcaaacaagtttgcacttcggacaattcgggtttgacgtatggcacgctttgaccgcgcgattcaaacggcattgcgattgatcgcaaagaacggcgaaaaggtgaaatggcgcgttattgacgacgcagccgcgcccgatccgtcgcagccgtggaaccccggcccggcaacgcccgaagacaaggacgtaactatttgcttcttgccggttgatcggcaaacgatggaaacatttacgtttatcaaaggcaccgaagttccgaaaggttcggtaatggggcttatgggaaacgtgccgtttaatccgaacttgaaagacgtagttattcgggatggcgtagaacttcgaatcgcaaatatcgacgttctttcgccgaatgggcaaaaggtactttacacggtagtttttcaagcatgattgaatttgaccaagcccgcgacgaaatcaatacgctgtttcttacggcgtggaacgctaacgcgggcgcggtcgtcggctatgttcccgaaattcgttggcagggcgtacagtaccgcgatttgccggacggttcgaagttttgggttcgcgtgtcgaaacaaaccgttttcgaagaacaaacaacgctttcaacttgcgaaggaaaaccgggacaaaaacgttatacggcgtcggggcttgttttcgtgcaagtgttttgcccgaaatcgaatacgcaagctttcgcacttggtcaaacgctggcgaagattgcccgcaatgcttttcgcggaaagactacgccggggaagatttggtttcgaaatgttcgcataaacgaacttgaccccgaagaactgtacgaacggtttaacgtcgttaccgaatttgaatacgacgaattaggttgaaggagttacgaaaatggccgattgcgctatcaacaaaatcgactcgaacattaccggactggcgtatgccgaagaagaatgcttgaagcaacttccggcgtccgtcacttggtacggactggaaccgaacagctattcggacttcggcggcgaactgtccaccgtagcccgtgcgcctatcgacccgtcgcgtcagaacaagaaaggcacgattaccgatcttgacgcatcgggcggcttcaattcggactttacgaagtcgaaccttactcgcatcctgcaagggttcttcttcgcagacgcgcgcgaactgccgtctactgcgccgctgaacgccgcagctatcgcaatttcggctgtcgatgctgcgacgaaaacctataccgttgcaagcggtggcgcggcgttcgctgcgaacatgcttgtcaacgcaaccggcttcgcaaacgctgcgaacaacggccttaaaaccgtcgcttcgtccaccgcaacgactgtcgttgtcaacgaaacgcttatcgacgaagccgcgccgcctgctggcgtgaaactggaagtcgtcgggcgtcaactggccgcagccgatgcgaacatcgccgttacttccggcgtcgcttcgttggtcgtcaccgctggcgactttacgaccatgcccgaactgttccccggtcgttgggtgttcatcggcggcgacgcggcgtcgaaccgctttgcaaataatgtgggctacgctcgcattaagtcggtttcggcgaaggcgcttgttttcgacgatacgaccttcgcggctgcaaccgaaaccggaaccggcaagtcgattcgtctgttcgtcggcgtcgttatcaagaacgaaaaagacccggcccttatcaagcgtcgttcgtacaacatcgaacgcacgttgggcaacggcgaaaacggcgttcaatgcgaatacttggaaggcgcggtagccaacgaatttacgttgaacattccgcaggccgacaagctgaacgccgatcttacgttcatcgcgtgcgacaacacgcaccgcagcggcgaccccggcgacgaacaaaaggccggtacgcgcatttcggcaccgggcgaagatgcgtacaacacttcgtcggatatttaccgtatcaagatggcggttcacgacgacgcttcgtcgaatcccgccgccctgttcggttacgtgtccgaagcgaacgtttcgattaacaacaacgtttcgccgaacaaggccgtcggtatcttgggcgcgttcgacacgacggcgggtaacttcgaagtcggcggttcgattaccgcttactttacgaccgtcgcagcggtgaaggctgttcgtgcgaatgccgacgttggtttgtcggttatcagcgcggcgaagaacgccggtttcatcttcgacattccgttgcttggtttgggcggcggtcggttgaacgtcgaaaaggacgcgcctattaccgttccgcttgaacccgcaggcgcggaaaacgcgaacggctatacgatgctgtacgaagtgttttcgtacctgccaacggtagccatgcccgattaagtcgggtacacttgaagggccggatttttccggcccttctttcatccatcggagtaaatcaaatgtctggactgtttaagcaattcaaaacgaattcggcgaaggaaaccgaaggcgtcgaaattgaatttcccgaagcgcagaacgacgacggcaccgttcccacgttcatcatttcgcgcatgggcaagtcgaacaaagcgtattccaagtcgctggaagccgcgacccgcccgtatcgccgacaggtcgaattgggcaccatgaaaaacgaagtcgccgaacagcttttcatgggcgttttcgtcgatacgatcctgcgcggctggaagaacgttcaagacgaaaagggcgaagccatcgcctattcgaaggacgcggcaatttcgcttctgttcgaactgcccgacgtttacgaacgtctgcaagaagaagccaagttgtcggccaacttccgcgattcggtgttggaaaccgaatcgggaaactgatagaagttctagcgtatctgttcgaactaggcccgcacgaacagaccatagcaaaacaggcgatgcgggcgggccagccgttacccgaccgcatcgccaacgcgccagaacttgaaccgggcttgcagttgtatttgcaagccttcttcgatttggatagcgaacgaacgcacgcaatgggattgacgccgattccttggacaagtattgcggcgtatgcgtcggcattcgaattcgacgaagaacagcgggaagacttgttttattttgttcgtaaactggattcggaacatttgaagaaacttgaagcgaagcataaggcgaataaaggcaatggcaaacgaccttctaagtctggccgttagtctggaacgcaaggctaaggcaatcgacgaagcggcttctaaaacagccgtcgatactgcaatggctattgtgggcgacttggcgtataagacgcccgtagatacttcgcaagctttgtcgaattggcgcgttacgcttgattcgccagcaaccgggacgattgcaccgcattaccccggcattcaaggttcgtcgcaacgggcaagcgcagccgaaacgattaacgcggcaaaaagcgtacttgcaaacaagaagcccggtcaagcgatttttattacgaacaaccttccgtatatcaaacggcttaacgacggatattcagcgcaagcgcctgcgggattcgtcgaacgtgcggtattgattggccgcaagatgcttgcgaagttcaagattaaggattaagacgaaatggccgaaaacatcgaaattaaagtacaggataaagtcgattcgtccatttcgaccaagcttaaaggcatcgcttcggatgcccgcaccgccgacagcgccgtaaaggcgttgcaatcgtcgttgaagtcgatttcggcttcgtccggtctttcgcgccttcaaagcgaacttgcacgtaccgccattctacagcagaagcttgccaccgaaacgcagaaaacgcaagtcgcaatggcgaacgttgaagcggcgttgcaacgtgctatcgcagccgaagccaaggcaaacgcggcaattaaccaactttccgccgcgcagtcgaaggccgctaccgaagcgcaacgtttggcgacggcccaacagcagaccgccgccgcagcggcgcaggcgcaggccgcacaagcgaacttggccgcagcgcaaaccaacagcgcgaccgcatcgcagcggcttgccacggcgcagcaacagacgaccgcagcaacggccaacgccgccgcagcgcagacgcgcgcggctacggcgcaggtacagggccagaccgccgcgcagaaccttgcagcggccaccacgcgcgccagcacggcccaaacgcagggggcgaacgctgcgcagcgtcttgccaccgaacagcagcgtacagccgtccagacggccaacgcggcggcggccaacgaccgggcggcccttgcagccctgcggctggcccaagcgcagcagcgggccgggcaggcgtcgcagaccgcaggccagcaaatcgccggatacgtcaaagccgccgcaggcatcgcaggcgtaacgctgtcggctggcgctattctcgcatcggcggacgcatatacgacgctgcaaaacaagttgcagaacgtcaccgaatcgcaatcgcaagtcgtaacgcttacgaaagaattgttcgacttggcgaaccgcacgcgcgcgggcgtcgaagaaaccgcgacggcgtttacgcgctttgatcgtgcgttgaagttcatgggcaaatcgcaagaagattcgttgcggttgaccgaaaccattaacaaagcccttatcgtttccggcgcaactgcgcaagaagcgtcgtcggctttgttgcagctttcgcagggctttaacgccggtaagctgcaaggcgacgaattccgcgccgtatccgaaaatatgccgatggttcttgacgcagtagcgaaggcgcttaacgtgcctatcaaccgcgttaaacaactttcgaccgaaggcaaaatcacgtccgaagttctgtttaacgcattccagcttatacagaagtcggtcgatgacacgttcgcaaaaacgacgcccacaatcggccaaagccttaccgtcttgaagaacagcgcaatcgaattcttcggcgaattgaacaaggcgaccggcgttacggctgcgctgtcgaaggcgattctttggcttgccgacaacatgaagaccgttgccgtcgtagttacggcgcttggaacggcgatgcttcttgcattcgggccgcagattgtcgcggctatcgtttccgcaacgactgccgtaaaggcgttcaccgtcgcgcttgcatcgaacccgattggccttattgctgtcgcactggcaaccgtcattgcgtaccttacgctgttccgcgacgaaattaacttgggaatcgacgacgttacgaccttgggcgatttcttccgcgcgaccttcgaaggcatcggacaagttattagcgacgttaccttgattgtcggccaattgtgggcagacatgaccgaaggcgcgtccggggcgcttggcgaaatttcgtcgttcgttggcgatgctgtttccggctggacggaagactatacgtcgttcttccagaccgaacgcaccggatgggccgccgcgctggaaaacaccgcgaaagttcttgacgcaatcgccggattcattaccggccttgcaacgttcgcaggtcgtgctatggccgaagtcgtgattaccgttcaaaacggaatcgcaaacggctataactatatcgtcggatggattgaacgggttacgaatctggcgattgaatcggcgaataagcttcgcgcgatggtcggcaagtcggcatacgaacttgtcaacttcgaacgcatgggccaagccggacaaactgaattcgaatcttggggcaagctttgggccgaatcgctagaagacggcttcaagtcccaaggcggcgcaatgcaaaaggtcgtcgaaggtcttatgacgcgcgcgcaacaaatcggcgcgaatcgtcgcgcaagcgaaaacgcttcgcttcgcggcgcaggtgcgaaccaacttagcgcagctaccgacgacaaggcggcgaaggccgcagaacgtcgcggcttggcgttggaaaagatcaatacgcagcttgataacgaattgaaccgcatgtttacgcttcaaccgcaacgcgaagcgcaagcgaaaatggatcaaatcgaagaatcgttgattcaacgtaaaatcaagcttaccgaagacgaacgcgcttcgatcatggcgaagattcaggccgtccagcaagcgcaaatcgtgcaacagaagttcgacgcgatttataacgaagctgtcggcccgcaacgcgattacaccgccacgcttgaagcttcgaaaaagcttcttgaccttggcgcgatttcgcaagaacagtattcgcgcgcagtaacgaaggcaaccgaagaattcaagaacgcgcaagacccgatgcacgcgtataaccgcgaccttgaccaacagttgcagcttttgcagttgttgccgaagcaacgcgaaatcgaacagcaggttatgcaagtgcaaaacgacctgttgacgaagggcattacgcttaatgccgaagaacttacgcaactgcgcgaacggcttacgctgttgcagcaggcgaacgcgcttgcgcagcaagaagccgcgctaatggacgcaagcgttacgaagcgccaacagtatatcgaccaattgaaggcgattaacgcgcttaaaaacaatccgcaaagcggcttcacgcaaggcgacgcagctaacgccgtaatgaacgcgaacagcgatcttgacttcacaaataccgatacgtatttcgaaggtcaagcgcagaaatacgaagatatgtattcgcgtatcgaccaattgcggcaacaggatttgattagcgaacagacagccgcgacgctgcgccaacgtatttggctggatcaacagaaccaaacgcttaacgctgcgtcgggtttcttcggacaaatggcgcaattgcagaagtccgaaaatagcaagatggccgccgttggcaaggccgcagctatcgcgcaagcgatgattaacacgtatcaagctgcgaccggcgcgtattcgtcgcttgcgtcgattccatacgtcggcccggcgttgggcgcggctgcggctgcggctgcgattgccgcaggcttggcgaacgtccaacaaattcggtcgcagaataccggcttccaatcgggcggctatacgggtagcggcggcgtgtcggaagtcgcgggcgtcgtacacggtcaagaattcgtaatgaacgcagcttcgacgaaccgcattggcgttgataacctgcaagccctgcaaagcggcgcggccagcgtccagcgcaacggggataatgtgggcaccggccaagcggccccggctgctgcgcccgaagtaacggtaaatacccccgttactgccgtcgtggtacaatcgaaagaagccgccttggctgcgatgcgttctagcgaaggcaaggcgtttgttatcgaaacaatcgaagaaaacggcggcactgtcgcacgaattgtcggagttaaataaatgggatacgcaatcggaacagtgaccaaaggcggcggcgatgattgccattatcaagttttggcgattatcaaaacgctggccgaagctaacggatggacgacgcttcgttacgttagtaccggcgctaaccgcgaattgattttgaaaggtgttggcctttctggcgaagaagaaatcttcgtaggtttcaaaacttatcaaagcgtaagcggtgattactacaacataaattgcggcgtattcatcggatacattgcgggaaatactttcgaaacgcaaccgggcggcatttattccggcacgcctgcccacaataacgcaattacgtatttcatcacggcgaacgcgcagcgcattaccggctgttttaaagtcggcacgccggtttacgaacatttctacgtcggcaaattctttccgtatgcgcgtccgggcgaatatccatcgccgcttgtttgtggcgcaatgttcaacgggccggaattgaaacgatttgacgatacgtcgcaagttttcccgtatcccggctattactattcgacgaattacaattggctgtttaatcgggatcaagcgggcaattggattcgtccgtactgctatccgtttacgcaagcaaacgatacgacgaccgcacttgcagggccacaaggcagttatacgttagttccggcagatacgtattatcaacttgaacccgtaatcatggcgcaaacaagtagcagcgccgttccttctaacgtatggggcgaattcgacggaatttatttctgttccggttttaacaacggcgtcgaaaacgtagttcaagaaggcggaagttctgtagtcgatcaaaccggacttagcgttaaagacgcagtagacgcaattatagctgtcggcggtcgcgctttcgtcatgcttcaaaacgtctatcgtacttcttggcgcgattttatcgcaatggaaatgaaataatggcttacattaccggaagcgccgcaactttcgcggatttgcgcaccgcaattcataacgcttgcaccgctaacggatgggcgttgaatgacggcattttgtctaaaaatggctgttatttcatgttgaccgcaggaacgcaaagcggatacccgatgcttcgcataaacggcggcaccgggcaaagcggttcgactttgaacggccagccgccgaataactacggtgctatgctttgcagtaacgcagggccgggcactgaaattacctttccgattaattacgaaattcacttgttcactaatcccgacgaagtgtattgcgtaattaactataattcggatttttaccaacaactgtcgttcggtaaatcggacgttcccggcattggcggaactggtgcatggttcaccgctgctaaacgttccgatcaagctttggacagtaattcatacggcaacaaagtatttatgtccgcatattggccgtcaacggtcggagtatcgccgtatgatggttttccgttgggattgttttttgattttaacggcgatcttggcggttcgtatttttcaagttatgttcatacgaaccttgattcgacgccttggcgaagcggaaacacaaacggcgcaacttggggcggtgcgcgcgctgttgcttcgttgcttcttgcgcttcccaacttgtccaatcaagctacgattttgcttccgattaaaccttgtgcgcgtcgcaacgacggcggacttacgattattgcaaatccaaaaaacgcgcgttatttgcgcatggataacgtagtccccggcgaaattgttactttcggttcggatcaatggaaatgctatccgttcatgcgaaaggacgcaaccgttcgcaacggcgtaggatgggcaacaggtgcaacgcatagcggcaccttcggttatgcaattcgttacaccgggacttaaaacatggccggacgattgggaacatttcttgccgcgcaaagcttcgaatacggttcggttaatgcaaatatttccgaagaagtaaacgaaaataccgcagcggaatacaacccggctttttacgacactaaggacgacggcatttatggcggtcgttctttttatcgtattcagcaggctaaccgctggtctattgtgggcaacgaacaagcaaacttcttccgtgatttctattttcgaattcacgtacaaccgttgcgactggacttgcaaacggtcgcgtcgtcgcagacgcgcgaaattagcgtatggaacgcatatccgtacactttcgcacaattgaacgacattcttgtttcgaatccgcttggtatcgaaataagcggacaggcaacgccgtacagtatgccaccgcttaaagaattgacttacgatgttactatcggcacttcggggccgccgaacattaacgtcgaaattcaattcgatttttcaaacgttgacaatccgttgccgatcttggttacgggtacgcgcgccgttaaattcgacattatccccgaaacgccggtaacggaagaatgggaatggttgacgaataacattaccgcagttgacggaaccgaacagcgtattgcgctgcgcggtgaattgccgcgcgtaactgaaagccttaaagtaattttcgacgatcaatcaaaattgcgcaaattttatgccgatcttctgtcgtgcgtcggtcgtctttggattcccgaatttcagtacgcgacgcgaattaccgcagcaagcgcgaccggaactttccaactgtacttcgatgatgcgcaaaccgacgtgcgccccggtgaatatgttttgattcaaacgccgttgaccgccgcacttgtcgaaatcgacgtattgaatgcttccggggctactgtaacttcggcgctgttgttcgacattcccgcaggttcgctaatcatgccgggttcgcccgcgctgttggacgatgcttcgaaactgtcgcgctatgctgtaaacgaagtcggcgaaacgacgctaaacgccaagatgattcgccagcggacgcagctacagcgtcccggatcaacgaccgtacttccgacgttccttggcgaacctgtcatggacaagcgcccgcttgccgatgaattggtagacgacgccgtatacacgggtcaacaggctatcgacaattcgaccggccttcctgacattatttcgcgttgggactatagccgtatcggtggcccgcgtagcttcaaagtcaatcgtattaaacggcccgaagaaatggattattggaaggctgttcttgcgtatgcgcgcggcgcggtgcgcaaattctggatgcccacatatcgaccggacatgcgcgtcattgtccagccttccgacgcatcggcaacgtttacgattgaaggcgtagaatatgccgaaaagatatatcagattaaaacgcatcgctacattgaaatcgaaacagcttccggcattcatcgaactaaagtaataggcgcaaccgtatttgattcggcgactgttattcttttcgatccagctttgccgactggcgcaggatggacgaatatcaagcgcgtttcgtatttgctgcctgttcggcttggcgaagataaggtaacatggaagcattacggcctagaaagccttttgcagctttcaatagttacggcggaaccttaaatgtccgattatgacgacaaagaattaagcgtagacgatagcgccccttacgaattatacgaatgggtcggcacttatcgaagctactatatgacaagcgacgcgatttcgcacgttttcaacagtgcgacgtacaatcctgttcccggtttgaagcgcagtacgttaaaagccggtacgcacgaagaagacaacatagatttaacggtaacgcttccaatcaccgaacagcttgtaaaggattacggctttcaaactacgccgccttcgttggatttaacgatttatcgttttcaacgcgacgccgctacgtttgttccgtattggaaagggccggtcgcttcaatcgtgattaacggcgaagacgcgacaattcgcacgccaagtaaattcggcaatattctgcaaggcaacataccgaatgtctacgttcaaccgccttgcaataacgttttgttcgacgaacgttgcaaagttagccgaactgacaattctgtaagtacggtcgtttccgtagttgaaggggtgcaaattactgtcgcttcgattggttcatttccaagcggatggtttgtcggcggtgaaattgcgattcctgcgcgcaacgaacgtcgaatgattatcgcacaagctggacaagttttgacagtaaattacggcttttctcgcataactcccggaacttctgtcgaagttacggcaggctgcgaccatagttacacaagttctaacggttgtccgaaattcggcaatcaaattaacttcggcggatgcccgtttgttccgggcgaatcgaacaacccatttacgaacggaattagctaatatgtgggtcgcaatcgttatcgcggtaatcgcgttgcttatggtcgcgtttatgccgaaaccgaacgttgaaaacgcgcgggcggcgaagtttggtgacttccaagttccccggtcgaaatacggcgatccaatgcccctagtgtggggaactgttcgccagaagtcgccgattacgttttggttcggcgacttccgcccggttccgattaagaagaaagtttcttcgggtttgttcagttcgaagaaagttattacgggttataaaaactacgtcggtattgactgctgtttgtgccttgggccgggcgtcgtacttcgtaagttttgggccggtacgtatcttgtttggactggcaccgcgactggtattacgaatattgtaatcaatcaaccgaacttgtttggcggcgacgatcaacgcggcggcctgcaaggtacgttcacgttctacgatggccgttacgatccgccgcgcgattcgtacttggcttcggttcttgatccgaacgttccggcgtataacggctttgcgcgtgccttgttcaagtcgttttatattggcacgacgactaatcttgaaatgttcagcttcgaaatttcgcgtatgacttccggtcttcacgcgacgtattcgattatgccgaacggtcttgatttgaacccgatggaaattgcgtatgatgccattacgcagaagttcggacgtttcggcaatttgccttcggttttggacttgccttcgttcattgcgtgcgcgcaaacgctgtataacgaacaaatgggcatgtctatggccgcgcaatcggctattacgggcaaagacctgttagaagaaatcatgcggcaatgcgacggcttgctgtatcaagaccctgcgacttcaaagattgtcgccaaacttattcggcaagactacgacgttaatacgttgccagttcttgacgaatccattattaaggaattgaagaacttttcgaaaacgacttgggacagtacgtttaatcaatgccgcgttacgttcaaagatcgcgcaggcgattacgacgacagcgtagccattgcccaagacttcgcaaatatcaactatcaacagcgcgtcaagtctaccgaaatttcttcgcccggttgcacgactgccgatgttgcgaataagcttgcggcgcgtcaactttcgttgattagcgttccgctgtataagtgcgatattacttgcaatcgcaaggcttcgacgcttcgtccgggcgacgtattcgttttgaattgggggccgttcaacctgcaaaaaatggtcatgcgggtttctaaaattgaccttggtgaacttacttcaaacgaagttaagatttcttgcgttcaagatcggttcgctacggcgacgccgacgtttgcgcccccggacggttctggctggacgccaatcaataccggcgcaaatccggtcacagtgcgaaacctgttcacgccgccgcacttcttggcgcgtctggcaccgaatgaagctctttcgacattcgacactcaaggccggttgtacgtcttggctaaggggccgtcgtcggcgtctatttcgtttgatacgatgttcagcggcgacaacttcgctaccgatcccacactagccattgaagccgggccatataacggcggcggtacgctgtcggttgcataccctgataccgtggccgctgcaacgcgccaagacacgtcgggcttgttcaaggtgcaaggcgtgtcttcggcagacattgcgaatttgcagcagtatacgacgcttgcgcaagccaaagacggttcggcaatgttgcttgtcaataacgaattgtttgtttatgtcggcttcgttgacaacggcgacggttccgttacgttcccgaatttgtatcgtagcgttctggataccgtgccgggcaatcatgctatcggcgaccgtgtttggttcgttggtggcattgacggtttgattccgcaacttttgaataacggcgctacgggttacgccaagctgttggatacgacgacttcggataaactgtcgctttcgtctgcgcctgcggtatcagccgcgcagaatggccgcgcacgcctgccgtatcagccgcagaatctaacattaaacggaagccgcacccccgcccctgtcgcggacgcaacgtcgatcacggcagcatgggcgcgccgcagccgcgaagcgcaagccctgtccgttttcgacgatgcggacgccgggctagaaacaggcacccaaacgcgcattcgttggcgtgttggttctggcggttatacaacggtgaatgttaccggaacttcgacaaacttaaacgttacgggtcttgtcggattgctggaagtgttggcggacagccaaataacggcaagcggtttgtatagttcgaattacgaacgtcttaccatgaatcttacttcgggttctttgcaatattggaacccttcggataaagcttcgcaagttgctttgtctaacgcaaacaaaacagcgggcgttattgctttcggttctgttcgcggcactatttctgcaaattccggtcgtcgtcaatttgaattgactatcggggcaactccaaacggcgttcttgtcggcgtcggtactgccgcagcttcgataactaactatcccggcacggacgggaacgcttggggttattacaattccgatggttctatttatctaagcaacgtttctacgccatacggcgcaagttttaacaatggtgatgttatcggcgttgttgtagattttgacgccggtactttaacattttacaaaaacggcgtttcgcaaggcgtagcttcttcggcaatggctggccttacgttgtatccgattgcaggggccgggagtagcggcggaagttataattacgtcaccctcaacgccggaacggaagctttcgcatatcctgtttccggcgccacgacttggatttgacaattagaagaaagccaattcgccgttcttggctttcttcaaacgtccgcagtcatacagcatttcgaccgcttcgttaatgtaccaatcgtaatttatatcgtcgggaaattcggtcggcaagtccattacaggacgcgcgccgtccgttttcccgactttgtttccgctggcaacgtaagcgatatgcccggcttcgttcttcgggtaataccagcgaacgaccttgcccaagaaacgcccgttcttttcgccgccgccgtgaacatttttcacgcatacgaagcgccggaagtcgcggcattccttaatcgtcttttctaccggcgttccttcgacaaggaaccgaataacagcgtcggaacataccaaagcttcggggttcttcgacagaatcgaattaagtgcggaaccgcgttcacaataagcgcccttcgtcttagcgcctaatttttcatccaagaagcgcgcttcggcgtcgccgccgtcgtccttgattgcgacatagctattcacgtcgcgggaatatacggccttgtatcgcgtttcttcggtcttgtatcccgtatgtgcttcccatgctgcaatcaagttgcgtacttcttcatgccgcgacttgtgatatttcgaaatgaagccgtccgtattgccggaaatgacttcgacgccgattccttcgattgcttcgataagcataagcaatacaagctgtccggtaatcgtaacttgcaacataagttgcggcgcatacagcgttgaatatttgttaccaagcttgccgaagcttccgttaatcgtaatcttcaagctgtcggcaattaccttccatttcttcgcgcctttgcggtcgccttctttcttgcacttcgccgccatcgccttagcgtgaattcgcgtttcgacgatcttgttataaaccgtcaagaaagcttcgcccaagtgcggcgggaacagcttttgattaagaattgtgcgcggatagaacgattctacgtcgttatccgctagaataatgtcttcggttgcgacgtgcgcggtcttcttttctgtcgaatgaaggccgcccattccaagtttgtacgtcgatttgccgatagttactttcagcttttcaatttcggtcggcatgatgggcgaacccaagccgtccagatagaacgccgcgccgcgcacgacttctagcatttgctgtaactgcggcgtctggaaacaaacgaagtccggtacgttgtaatacaacgggccatcgtctgttagtgtgggcttcttcggatagtaacccaacaccttttcaagttctttattgattaccgcttcggctacctgcgcatcggatttcgaccgaagttctacgccgtattcttccgacatttcggcccgcaacttcaattcgggcgcaagttcgttgaacagaagttcagtattcgcaaggtcgttgcagcagtacgggcgaacgattgcggcatcttcgcgcgtcaatacgtgcgtttcaggaaatggcaagtcctgcatacgttcgcaatgcagccgaccggcgtacagcttcaacgacgccgggcgcgcagtaacgccgccgttcaccgggcaaacgttgaacaagtcgatatggttgtagcggccaatttgtacgccgtatttcttttcgaagtcgaacggcgtaaccttcttcgtaccgtaggccgggccgcttttaatgatgaagtccgaagcttctttaagcttggcgcacgatgcaccgcgcgccgcaagttcgatcatgggcaagtcatacgatgcgctgttgaagcccacaatacagaatcgccaaagcatccaaagaagcttcgtcgggttaaagtcatggtcgggcgaacgttcaaacgcgacgaactttccggtatcaagcgacttaaacgcgacataccaaaagttgatatacgtttcaacgtcaaagacgaagacgcttccagcgggaagcgccattagttcttcgtccgacatgaattcgacaggccgcaaagcatggcgaatgcttgcggctaacttatcgacgacgcggcttttcttggcaacgatgaagccttgttcgttcaacatatgacagccccttagaacggtatatcgtccgaatacggatcatccgaagttcggttaatgtacgtatcttccgactgttcagtatacgacgcttcggttccaagatcaagccccataactgcgccgcgcacgttgtcgccgtagaaaattactttgttcgtttcggcgtcgaaatgcgctttcttgaatgcgtgttcgacggaaagcaaaagctttgcactgaaccccattcgttccggcaagccttcgatacgatacgtcgaagcttcttctttgtgcatacgcgacaataccgcgccatcttcgaagaagacatggccgttcggactgaacgattcgatagcacgaacgccccggtaaaagtcttcggggatcggccaaaggttcagattcggaacgtccagaaccgaagcgtaattcgggtaacgttcgccgtaaagctgcgacttgataaacgaaccgtcttcgaaatagaacgtcgccgacgactgcgaatagccgaacccggtaagcgccttcgacgccttcgcaatggccgacgctgcggccttcggaagcataaggccgggcggaaggtcgatgccgtgccacgcttccagcagggccgccccgttcgtcgctacggcgcttccagcttgcagcaggacggcggcataggtcgcattcggcgcgccgtccgttgccagccctgcgaccgcagccaaggccgctttaacccggtcgtcgatcacggcgcattgcggatcgggcggcatgatgggcacttcgtcgaacgctacgcacggcacaagcgcccggaatacgccagacgatacggcaagggtgttcgctgtaagttgcgtaatcgacaattcgtcgccagccttcgacagtgcgtcgataaactgcaacgtatgcgggcacgcggtcaagtcttcttcaatcggcgcggccacggtcaagacgccatcgaaggccgccgcccaattgtgggcaatgtgaccgaactggatatttaccggcccggccttcttctgcgcaaccgaaataaacttcaatgctgcgataagcgaagcggcggagttcgccgtcttcttcgctgtcgtaccttcggcttgcttgcgggcgcggcttttgcgcttcggcttttccggcgttgcaggaatcggaacgtcgttttcaatttgcgttgtcatagtttcaccattcagcggaaagaacttcgggatacttcttgttcacccaaacgcgaagccttgcgggcgttcgaagttcggatacacgttgcaaagcttgatacgtcgtcggcggcggttcttcgcggtgccgctgtcgccaccaatcccgcgaacgtttcgccgcaagtccggggtgttcaagcatcacaaattcgttaaacatttggaagccgcaaaagtacgatactttaatcatcggcggctttgtcaagttgccttgtgcgtcgcgtttttcgtgaaggttgtatatcaccttttgtacgtcgaaatattcgactatcggggcatcgctgcgcaacggttcggcgacgcccggcgttgcaaacaacttcgtttcgaagctgaattcggcaccgcagttaatgcactggcgcgcggcggcatgattgtatacgccgcaaacttcgcaaatacgaaccggcgcgtcgccgccacctttgccggggcgattcggaatacgcgggtcgttgatcgggccaagccgacgaatgttcgccgcgaagtcgccgacaagacaattcatcttgccagtttcgggacttgggcgcgttccgcgtccgtacttctgtacgtgtttgcccggcgataacgtcgggttcaaatcgccgatgaagtcgattgccggatggtcgaagcctgttgtaagtttctggccggatacgataccgcgaagttcgcccgctttgaatgcgcgcaaacgttcggtattaaccttgtctttcaacttcgaatgcacgggcaacacttccagcccgtaggactgaattacgtttgcgacgtgttccgtattgtcaatgccagttgcgaagacaagccaagtcgaacggttatacgccatttccatcatttcgcggacggcgttaaatactacgtcgtcatcgtctgcggctttttcaagttgcttcgaattgaattcgccgccgattacgccaacgcctgaaatgtcaatttcggttttcgttgggcgcgcaataagcggcgacaagtaaccttcggcaatcaaacgattaaacgattcaacgccggtaatgtcgtaacaaatatcggtgaatattccgttatcggtaatcatgcccattttcatacgatagggcgttgcggtgaatccgataactttaagatgcgggttaatcgcgcgcaattcggcgataatgtactgatagaacgaatcttctttgtccgaaagcaaatggcattcgtcaatcaacagcaagtcacgccatccgaaatggcgaagatgcggcgggcgtccgtcgttctgttcaagcgcctttttaatcgccggggctacggattgaacgccgccgaatacgataggcataatcatttcgcggctgttcaagcctgcggaatagatgccaaggggcgcagtcggccagaccgacattaacttttcggcgttttgttcgatcaactctttaacgtgcgtcaacatcattattcgctgattcggccaaagtccgaaaatgcgacgaatgaagttcgcaattacaacagatttgccggttccggtcggcatagcgacgaccggatttccgacgtttccgcgctggaaatagtcgaagattgaatattcggcttcgtcctgataccagcgcggtacgtagatactagacattttgcgttgtcgccgtgataggtacgtaagacgggcaagcctgcggtacgaagtcgcggggtattacgccgttatgtacgtcgcaaaaccattcgccattttcgaccggacgggccgccttgcagctacgacaattcttttcaggaatcgcgcctttgtggcaaatgtccttcgccgcgcaatacgtgcaatccttgaacgtcggattatcggaaagacgcggcggcggttcctgcgacagaatgatttgttcggccttttcccgcatttgctggcctaaccgatgatccaacttcacaagttcgacgtgtaacgaatcgtcgttcttgttaatgttgaagtacagtacgtaacggaatccgtatgccgcgtcgcttccatacgttgaagtttggcaaaaatgctgcggcttcgcaacaggcataccggcttcgccaagcttgttaaagcctgcgccggttccgttcgtcttgaattccagcaatacaggttcgtcgattccgtagcgcgccggaagctttgcgataccgtcaagcgatccgccgaaatgcccattcaccgccgacacgcggtattgtgggaattccaagccgtccgccttcgcgcgtgcgacgtgttgcgtatagtacggatgttccttcgtaattggtgacgaaaggccgtcgccttcttcgccgggcttcgcaatccaatacgaatcgctttcggcgtgatacataaggccgtcgcggttttcgtaccaaacttcggccccgatgccttccagccattcaataaagcgggcttcttcacgatgcccacgattaaacagccgttgcttgcgtccgtccgtctgttcgcggaacgtccagcggaacagataccaaagcttgcgcttgcagccgtcgcctatcaacgacgcgccaaggtgccagcggtggccgccgtcataagtacgaacgcaatattcgtctatgtcttcaaggatgcgcttagaaagcgccttcgctacgccgggcgcgtcaagtgcgacgttttgttttccggcgtcgggcttcgtcgctggcgcgtcgttcagcgttaattgcgcgttcggttcgcttttcttgcttggcatcgttcttcacctttcgccggacaagtgcggcgtaattgttcgttagatagtcggcggaaagcgtcgcaacgtctttaagttgatccttcgataaccaactgatatggcattcggaagcgtctatgccaagttgcgccgcaagccaattgtacgccttcgaccgtgacattaagccagtttgccaaagacggtcgaattcgtcatgcgcttttgttcgaagctgtcgcgtagcacggtcggccatacgaccaagcggaacaaacgtgccggggtgacagccaacagcggcgcgacagtcgttgcagaaataaatatgcggccaatcgccgtaacggcgaccgtaaatccggtcgtttgttgttagttcgatattgaatgaacaacaggtatcgcattgttcaggtacgggcaatgcgtctttgattttcgacatacttacgcttttcccataaaagaacgccggggccggtgaaagccccggcgatgttacgccgctacgctagttcgtcttagcgtgcgccccaaggtgcggcaccgccagccggtgcgccgccctgcggttgctgctgccagccgcccggctgtccgccctgcggggccgcgttctgctgcggctgctggccgccccaagctgcgccgttgccctgcggctgctgcggctgctgcggctgctgttggggctgctggccccatgccgcgccgccttgggccggttgctgctgcgcgggctgctgctgctggccctgcggctggccgccccatgcgccgccctgcgcgggctgttgctgcggctgttgaccgaagccgccttggccctgcggctgctgtccgaagcctgcggcggcctgctgcggctgcgccggggctgcgccctgtccggccttgcccggttcgttgccgttcatgtcgaacacctttttaacttcggtgtactgcgggtcgttcttctgcggcccgacttcgataaggaacgggattccgtgaagctgcgacgaatcgttgatttggaacacgccgataacgtggcagactgcggacaactggcggtgcgcgatttcgaccgtctgttggttcgtatggtacaggttcaggcgatacgcgccggtcgtgccagcctgcgggccgtcgataatccgcaagttcagttgcagatagccgccgtcgttcgccttgttcgccttgacttcggacgattccacgataaccggatgcttgccgatgggcaggcttccgacgccttgggtcgggtcgtattgctgcgcgttgaaaggttgaatcagttgcatggtatttaccttttcgaaaagtcttcgccgttggttacggtggcaaagttaccgtttttggctgcgccggtaggattcgaacctacgaatgccggaatcaaaatccggtgccttaccgcttggcgacggcgcaaaagcttattgcatcgcttttgtgaaaagcgccgacaaatcgggcggttcaagttcgcccaagttgcccaaacgatcacgcgcgaacacttcgggaatttccttcgtccgcaacgcccgaaccggcttcggctggcccggtacgatagcttcgcccaagtgcaacacgttgtcgaacaggtgcggaacctttacgttaaggtctttgccggggaagaacggtcgcttttgcatgatcggttcgtatacgacttcgccgccctgcaagatggtttgccgtccgttttccatgacgccttgtttcgcaatcattacgatatgcttttgcggcatgtaatacaagtcgttgcaaatcttcatcgtgcgttcggacatattgccgtatgccttcatgccgtgtttaaccttcgacagttcttcggccaagatgatttcggcaatgttcgaaatgctgtcaatgcccaaggtatcgaagttcgcggcttcgcgcgacttcataaaccattcgaagaattcggtaatcagcggcggggaatacgcttcccatgcgggcacgttcgaaccgcgcatagacaacatgccgggttcagtgaccaacagcacggggcgcggcgcggtgttgataagcggcgtcttgcccgaaccgggcgaaccgaatacgacggactttacgccatagcgtcgggccagttgcgacgccggtttaagctgcgacatttgcattttgtttactccgattaaagcggcattattgacgacgccgacgctttcgctttcccgactgtccgttatggcactatgcgacgcgatgcgcggcccggactttcgatgccgtcaagaatgccgccttgattgtgggcaaggcggcaagtgcgttacttcttcgccttcggttccttgatttcaagggtcggcgtaccttccgacgtaacgataacgtcgtcgatgatcttgcggaagttgtcgggcagttgcttgtattcggtaagcgaaagttccggcgtccacttaaccaaacgttcagcgatcaattcgccagcctgtccggtcttttcgatcttcgacaacgccttttcaatgcgcgccttgtcggtcttgccttcggcgttctggatgaagccgtagcgaaccggaaccttcatcgtcgctttgtagccgccgccgagttcgacgttttcggtcgtgccggacttcgccgggtcgtgcatgaacatcacggccagcttgcgggcttccaattcggcttctttggcgacttcaagcgcggccttcttcgcctgccaatcgaccaacagacggtcgcgttcggcgatatattcggcttcgctgtagttcttgacttcgcccgtttccgggttcgttacctgaatgatattcggggtcatctttgcacctttcttcgttgggccgccgcacgttgcgccggtatgtgcgtaatgtacgacggcccgtttcggttgtcaagccttttgttcaagaatttttcgttcttcgaacaagtcccgattgttcgcgtcgtgttcggtgaacttctgcgggaaccgcttacgaagcttggcgatgttcacggcctgcgcttcaccgaagttcgaaccaatggcgcgaagcaacagcgcatcgtaccaaaagccgtcgccgacttcttcaagcgcgttcacgtcgtcgaatacggcaccttcggcggtcgccgacagggcttccagcagttcgcccgcttcggtcgctttgccgatgatcgcatgaacgatattgacggcgcgcgcgttggcttcgtcggtgccatcggtggcgatccaatcgggcagcttggcaagcgtgccggtgttgtcgccgggggcgggaacgccgcagtcgcggccatagaaaagcgtcttcttgatcgcgtccagcttcaccagtgcggcgacagcttcggcgatggtttcgcggaagtagccaagcgacacgcggtcgccgtgatagctacccgacgcggttacgtgcgcttcttcgatatagtcgaaggtcttttcgggttcgttcattgcttgcacctttcaaagtcgccgggcaccgcgccgcagcgttccgacactgtagcgccgggcatgttgcctgtcaacaaaattttgtcttgcctgctagaattttgtcgggtatagtgtcgttcatcttgcccacattgaaccgccgacatggtgaaaacatggccgaagttaccaaactgcgggatgaaacccgcgaactgttgttgaaccgcccggcgtcgatagacgttggcaccattgcggaagccatcggcgtttcgaagtcttgggttaattcctttgcgcgcggcgacataccgaaccccggcgtcgtcacgattgaaacccttaacgcttttttgaagaagtgcgcgaagaaggcgaattaagaatgtatcaaaatatacctatcgaaatgcggacatatccgcaatgggttatgtggcggtacgaagacacggattcgaagaaacctactaaggttccgtattctgcccgtaccggcgcactagccagcgttaccgattcgaacacttggggaacatttgacgaatgtttgcacgcgcttaattccggctggtataacggaatcggtttcgtgttgaccgacgccgacccgtattcgtttatcgaccttgacgacacgaaaggcgatcaaacggcgcttgatcgtcaaatcaaaatctacaacgaattcgacagctacgccgaacgttcgccgtccggttcggggctgcatatcatcgtaaaaggcgcggttcctgctggccgtcgtcggtcgtttattgaagtgtattcatcgcttcgctatatgaccatgacgggcgatgtttaccgtaatgcgccgatcaaagaacaaaacgaactgttaaacattctttggggccagatggggcaaggttctgtcgccgttgcgcattatgcaggcgtcgccgaagccaaggaaaccgacgaacaggtttataaccgtgccgtcgccgcagccaacggggacaagttcgccgaactgttcgcgggtaaatgggaaggcatgtacgcttcgcagtccgaagccgacttcgcattggtcgatattatcgcgttctacacgcagaaccgggcgcagattgcccgcatgttccgactgtccggcttgggccaacgtgacaaggcgaagcgtgacgattacgtgtcgtacatgctgaacaaatgctttgaccgcatgttgccgcccgtcgatattgacggattgaaaaacaagcttgacgaagcaatagccgcaaaagaagcccgcgaccgtgccgaagccgcatcgttgaataccaacgttccccaagcgccaatcgtcgcgccatccattcccgaaacgtcgaaggtgtattcagtgccgcccggacttgtcggcgaaatcgcccaatatatctacgcacaagcgccccgcccggttcccgaaatcgcgttggctggcgcgcttggtcttgtcgctggcatcgtaggccgtgcgtacaatatcagcggcaccggccttaatcagtacgtattgctgttggcaccgaccggaacgggtaaagaagccatcgcgtccggcattgataagctaatggcgcaagttatccgcaccgtaccggctgcaagtgacttcatcggccccggcgaaatcgcatcggcgcaggcgatcattaagtatatgtcgaaggggccaacgtcgttcgtatcgttggtcggcgaattcggtatctatcttcaacaaatggcaagcttgaacgcgccgccgcatcttttgggactgcgccgtttcatgctggacgcttacaacaaatccggcgaaggcaaggttcttcgtccgtccatctattcggacaaggacaagaacactaccgcagttcttgcgccgtcgttttcgttgcttggcgaatcaacgcccgaaaagttttacgaaggcttgcacgaaggtttgattaccgaaggtcttttgccgcgctttacgatgattgaatatcatggtcaagtgccgccgttgaacaaagccggggcgcgcgtacaaccgtcgttcgaacttatcgaccgcctttcgacgctttgcgcgcattcgcttatgttgaacagccaacataaagcgatccatgttcaatttgccgaaggcgtcgaacaagcttccgacaagttcgaagaacattgccgcaacaacgtaaacagtagcgaccgcgacgttaagcgccaactttggtcgcgcgcccatatgaaggcgttaaagctggccggtatcgtagcggtcggcaataacccatacgaccccgttattacgtcggacgttctgtcatgggcgaccggcgtaatcgttgcagacgtgcgcaacttgcttgcacgcttcgacgctggcgaaattggcgtagacaacgacgaaacgaaacagcttgctaaggtaattgcgacggttaaagatttcgtcgtatcgccttggccggaagttgcgaagtatgcaggcgaaggcgcaagcaacttgcattcgaaccgcattgttccatacagctacgtacagcgtcggcttgccgccgtatcggtcttccgtaaagatcgcatcggcgcgtctggcgcaatcaagcgcgcattgaagacgctatgcgaacggggcgacctgcaagaagtgtcgcgggctacgctgtcgaaggactacggaacgtccgccgtcgcgtacatgatcgcgcatccgggcgtcttcggcctgtagcggggccgggatagtgtgggcagaactggccgccttcgggcggcttttttgtgtctgaacgaaacatgaacgtatttccgacgaacggtcgtcgtaggtgttgacgaagcttcgaaactatcgtacaatcgtcgcatacaagaaaggagtttcaacaatgcagcatcccgacgacgtacaatacttcgaacgtttgcgcgctatcggattcgaaatcgcaaaggttaacaacattcgttgccttgttatagaacccaagcgtcgcgcaggcggtgcatacggacttgcgtatttgtccgaatgtcgaatcagcattgaagttcgcggcaaagaacttatgcgcgatggcggcgaatgggcgaaaaatcgttatcgccatgcttgcaacttgcatacgttggcgcacgaattggcgcatttacaagaacaccaaacgcacggcaagaccggacacggcccgcgcttccgtacttacgaaaccgcgttgcttactgcggttatgcagcttgacgcgacttccccacattaaccgaaggtgccagctatggaaatccgcatagacaacgtgaacgaagttctagccgaaatcggcttgaccggacagcacgaacgcaagggccaaggctggcaccgcgtttacattcacgccccgcaagaaggaaccgacgtaacgttgtaccttggccgcgtcatgtttcaacatggcgtattccaatgggtgaaatggtgcgtaccgccgaacgaaggcgaattgcaggattacgacgtatattggttccgttgggccgtatacaccgcaaccggcaagcatctagggccgaagtcttgggcgcggttgaaggccaaggcgcaggaacgcgcgcaggccaagcgcgacgccgccaaggccgcacgggacgccctgaacgccgacagggtagccgcaggcaagaagccccggacgcgcgccctagcgcctgtcaatccgcgccgggcggcgtgcatgatcgtcggcgaatggctgtccgccgaacttggccgcgaagttcacttgttcacattttaacgaaggaataaacgaaatgaccgacgtaattaaaacgtacacttggcgcgaatcttacgaaatgtgccagcaaggcaaatgcaagtttcatacgttcgatatggacggcgcttattgcgcgcatcctgaatcgttccgcgtttcgcctgtttttggctgttcgacaaatcgcatgattgccgaaggtctttgcaccggctgcaacgacgatccttcgaaaaataaacggcaattattcgaaccttgttaataattcgacaaatcgaccgcttcggcggtctttttgtttgttcgcgtataatagacgatggatcgtataatgcccctgtagaacacgcaaagccttgatacgcctagctttcagggcatttataacaagtataacggtataacgccccggcaccgaatcccccgccctattgataaatagtcactttcaataaatagctatattttaggtattatacttattatattttttatattttctttaatttcaaggacttagaagctatacagccccttcaatccgtataacgggtgactttcaataaaaagcttgacaattgataaaaggccgggtacgctagggctgtttataaattggagtgcgaaccatgaccgaagctaagaagtacgacgtaatcgacgcatcaccgaaggcgctatcgcattgcgtcgccgaagaagtgaagcaaggcgaacgcgacgtaagcgaagcgaacgcgaagtatccgtttaaatcgctgcgcgtcggcgaatccttcgcaattccgttcgacgacatggggccgggcacgctgcaaagcgtccgcagttcggccagcctgaacggcaagaagcttcaacgtaaattcaagatcattacgcacgacgattaccgttgcgtcgaagtcgcgcggatcaagtaaaccgggccaatgtgggcaacaaccgaaggggcgaccaatgtacgaaatccagaacgggcacaagatgccgaaggcgcgtcgcaaggctggaagcgaaccgccagcggtgaagaccgcatttaacgaatatgcggacgcatacaaagctgtttgcggcgtgcgtccgctgtcgtatacttacgacgtagcgacgaagtttattcgcatcgaaaacagcggcggcgtaagtctgtcgcgtttgcgcgaaatgacgaagcaacttcgttaccgtaaaggttgacaacttcgaactttcatcgtagtatgaccatgcgaaccgggcgcttcccggcaattgaaaggagttaacgcaatgtgcatcgtttgcgaaatcaaagccgatttgtcgaagaccaaagcgaccgccgaacaggccgccgccatcatggcgaacgttgaaaagctggcccgcgcaatgggcggcgttatcgacgtggtagaagctgcgcacgcgcgcaagcccgacgtgttcaagccggaagaactggcgaccatcgccgaagccgaagaactgttcgcgcagtccgaagacctgcccccgttggccgccgccctgttgggcgcgctgttgggcggtagcgtgaaagtcgaagtcgcgcatatccagatgaaggacggcgaaaaccccgaacaagcaatcgaacgttacatggccgaacgcaacgccgaaggttcgacgaagcattgaccaaacagccccggctagtgtatagtcggggcttcttcgtagggggacgaaaccaacatggccgacgaaatagacgcaacagccgaccgcatggacaacgaactagcgttgaccatcgccaacacttgccgcattgccgccgcgattccgaaaggctatcccggcgaatgcttcttttgcggcgaagacttcgcccgcgttgtcgaagtgaccgacccgcgcagcggcgaacgtgttgattcctgcgggcgctgtcgtgacgcaaggggcataaaatgacaccgaacaaactagcgaaagaatccgaacattcgcaacaggtcgcattgttcgcatacgtagctgtcgcacgaatatacgggttcgacattgccgacgaatggtgtaaaactggcaaattgccgaaatacgacgtatcgccggaaggtttgccgcgcgatatgcaagacgacgaaatagaacgttttggtcgcgtcgtaacttggtctaaagccgtaccggcgcttgaatggttccacgcgatcccgaacggcggtagccgtggcgacgacgaaaagtcgcgcaagatacgcggcggccagatgaaggccgaaggcgcacgacagggcgtagccgatacgttcttaccttggccgtctggcgaatggcacggcctttatatcgaaatgaagaagccttcgcttcgcccgaagtctgccgaagccaaaggcggcgcatcggatgaacaaatagccttcggccagtacgcgcagcgcgtcggctatgggtgggccgtgtgctatgattgggaacaggccgttagctaccttcgtagctatatcgaatggggttcgaaatgaacgacaaaccgataaccgaaaagttccgcgatttcgtgaaagaagacgggccgcgcatattcgaagaaatcaaggccaatcgggcgaagcttgaagcctgcccgaaacatcatttcaacatcggcgacccgccgtataagttcggtgcgaagttcacttgcacgaactgcggcggcacaatggacgcggtacaggcgttccgctactgccaaggctacgaagcggcgggcggcgacccgaacgaagttatcgaaggcttccgctaatggattgcctgaaatgcgaaataacccgcgcgaagcttaaaacggctggcctgctaattgtgggctggccgttgtcgcgtatagctgaacacctttccgactgctacggcgaacggtactacgtcgaaggcgacaagctgtatcgggcgtcgaagcttccgccgtatgaaccgcacttgataaggagtaacgaaaatgacacttgacgaagccaagaagaaggcacgcgaaaaccgttgcttcatcgtaacgaaacctgaatactttttgctgtaccgtgaatcaacgccgaagaacgtatgcgtcggcaaacgcaaggacgaaaaaggcatcatcgcgctagtgaaaaaagcttgcgcgaccgcttgacgtagcttcgaaaccgtcgtagactatgcccatagtcaacgaacaaggggcacgaaatgggcgcatacaccgtaacaactgaattcgaaatgaacgacggtcgcattctgtcgtgcgaatacggcgtatcgttcacgccgggcaactattccggtctgcccgaaaactgttaccccgacgaaagcgaagcgggcgaaccgacgtactatatcgacggcgaagaagtcgattacaaggacttgccgaaaggtcttgacaagatcgccgacaagttgtacgaagccgggccgggcgaatacggctacagcgaaaccgaaccggactacgacggcccggactacgaacccgacgactattattgaaggagtaaccgcaatgcctacccttgccgaactgttttggcacttcgtcacgctttccagcggcgtaaccatcggcctaatgctggccgcatggttgcgtatgcaatcgaaagtcaccgaagaaacctacgacaccgattgcgaattcgtaaccgaatatatcgccaacatggaaagcggcccgaagatcattcgtcgcccgctgtcgcaatggccgatatgggcggacagcattaacccggccaagacgaacccgcccgaacctgaaccgccgattcgcattgaacgaaactttatcggcaaaaaggattgacaggctttcgaagctgtcgtattctttgtcgtaccaactggcaaccaaaaaggaatcgccgccatgtacgcacttattcttatcgcttgcactgtcgttgctgtcgctattcacttcgggcttatccgccccgtaatgcacgccatcgaacgccagcgcgaagaatcgcggcgtcgtgcggcgcttgaagctggcttggccgctgcggcgcgcttgcaggcgtttaacgcccgtaagccgtcgaaccatcgcggcgcaaagctgaacgccgaacgcgaatggcggttgcaggaatgaagcgcgggcacgtcatttacacgcacccggacgaactgtcgaaatgggatcgccggtttatcgaactggcggaacaagtcgcgtcatggtcgaaggggccgcgcaagcgcataggtgcggccatcgtccggcctgataggtctatcgcgtcgcttggctacaacggcccgccgcgtggcttcgatgatgaagccttcttgcgcatgacgcgcgaagaacaacacgccgtcgtaattcacgccgaagcgaacgccattgcgcaggcgcacgacggcgaagccttggccggttacacgctgtacgtgtcgccgctgttcccgtgcgccgtctgcgcccgtcgcatcgttgacgcaggcattcggcgcgttgtcgcctattgtgggcacatttcccctgactggcgcgcgtctgccgatgaagccgaagaaatcttcatcgctgcgggcgtcgaatgtctgttcagcatggattaacgaatatgacgcttgaccattcgcaaatcgaaggactgttgttcttcgaagaccccgtaacgcataacgtaatcggcgcagctaaggccgcaccgctggacttgtccggccatttcgtcgcattcgggccgcgcattaccgttgatccgcagttgaagaacttgtttcttgccgcgccgacgttgtatcaaacgctgtcgcagcagtaccaagcgattcaaggtcttatcgaaatcgccgaaggcttgccgcagacgccggaacttgataagctgcaacggtcgtttgtcgaaatgcaaaacggcatgttaatggcgcagcttgtcgcacaaaaaggcatcgaagaagttgcgaattcgcttgacaagccgccgaagtagtcgtagactgtcaaacatcgaaacaacgaaccaaggtgcccacaatgaagcgtaatgttaaagtcctgttggcgattgccgccattgttgccgctttcggcgtcgttggttcgatggactaccgcgacgaagtgcgcgaacagctttcatattgtgagaacgtgaagaacggcgtatggccggacttcaaggaatggggcaaaactgaatgcagccccgaacgtatcgcagaacttgaaaatattttgcgttgatcgcttgacacgtcgaacgaacagcgtaaaattacccctgtcgcaataacgcgacgttaactttccttcgaaggagtttcaaaaatggccaagtccaagaagtccaccgctaccgctgccgcttccgccgctgctgtgatcggtcttgctgaaatcgttgcagccggtgcaaacgggctgtatactacccccgaagttcacggcccgcttgtcgaagctggcatggtcgaactgaaccccgccgggccgaacgaatccggcgaaactctcacccgcgccacgcagaaaggtatcgaatccatgaacaccgcaaccaacaccgccccggccaccgtcgccgctgctgccccgtcgtccttcgccatcgaagacggcatcgccatgccgaccgcttccggtcgcggtcgtggcggcaacgtgtaccccttcgacgccctgaacgtcggccaatcgttcttcgtcccgaacaccgaagacaagccgaacgccgccaagtcgctggcttccaccgtttccagcgcgaccgcgcgttacgccgaagtcgtcgaaggccagttcaagacgaacaagaagggcgaacaggtgcccgtcacccgcgaaacccgcaagttcgttgttcgcagcgtcgaaggcggcgcgcgcgtctggcgcaccgcgtaagaccggcccggcaagcggcctacgggccgcactacggccaacacgaagccccggcactgtccggggcttctttttgcctttctgctggcctacggccattttttcgggtactatcgggacaattcggggcgcagttcgccccttgcgcgtattaaggggctacgtagtgtcgaataacgaagcggggcaggatatgaacgaacgtccgcagaagatcatagacgcaaaattgccgctgccttggttgattggttcggcttgtgccgtagtcttttcaatgggcggcgtattcgtcaaactggacagcgtaggccaatcgcttacgaagctggaagcgaagaccgacacgcgcgacgaacgactgtcaacgttggcgcaatcgctgatacagcaggccgggaagaacgacgtacaggatgcgcagattaccggcgtccagaacgaaacccgcgaccttcgccgcgacgttgaagacttgaagaaaaatcaacgctggatgccgaagtaatgaaaaagaaagtcgaactaatcgaagattggcgtaccgcccataagctttggtcggttcgactgtcggctatcggtgccgccgtaatgggcgtgtttaccgtatggcccgaatccgcgttgtacctttggtcggccatgccgtccgaagtgcgcgcgttgatccccgaacggttcgtatccggcatcgcgcttttcgtattcaccatgtccgcactgtcgcggatcgtcaagcaaaggccgaagaatgaacgaatcgaacgaaagcccgcagaagaaacagccgaataaaaagacgcttgcgggcgtccttggcgcaggtgccgccgcaatcctgctaggcgtggccgggcaaaccggctttaccgaacgcttcgaaggcatggttcttcgcggctaccttgaccctatcggcgttccgacgaagtgcgcgggcgatacatacggcgtcgaagtcggcaagcgatacactatcgaagaatgccgcgaatcgctggaacagggtttgattaaacacgccgaacccgtgttgaagtgcgcgccgaacctgcgaacgcagggctaccccttcgcactggccgccgcagtcgatcataactaccatttcggcacgttctgcggaacgtcaatcgacgcagcgtttaagcgcggcgactatcgtacaggctgcgcacgcttcaacgaaaacgccgcaggccgtccgcaatgggtttacgtcaaggacggcaagggcggttacaagacccttcccggccttatcacgcgggccgcagcgcgccgcgaactttgcatgaaaggggccggataatgtgggctatcatcgtagcgggcgcaaagcgtttcggcggctggattctagccgcgctgtcgtttctggcgatgctggcaaccgtttggcttacgtcccgaaaagtcggtaagtccgaaggacaagccgaagcggcggaacaacgcgcagccgaccgcgaagccatagcagtacgcgaagttaacgaagcgcgcgaagcttccgaacgtcaaacaaaggcggtgcaaaatgcgaacgaagttgcttccgataatgctgttcttgacgacgacggcgtttctaagcggctgcgcgacgaatggtcgcgcgactaagccgccgcaatccatcgccgaaaccgtacaaacgaagcccgtaataattgacacggcttgcgattgggtgcgggcgatttgggtttcgaagtcggacgacatgacgcccggcacggcgcgccaaatcctgaaccataatcaagccgtcgtaaagaactgcgggccgcagaaaccgcccaaggtcgattcgccttaacagaacgtcggccttgcggtatagtgaaggcaaatgcgaatgacaggccgacgccatgaccgaccaacgtaacgaatccgaagaaaaggccgcatatgcggccttgcttttgaaggaacgcgaccccttcaaggctgcgcttcaactgttccccgacaacacgaaccgcgccctatgggtggcgaatcattggccgattgacgccgaagtaaaggccgaacaagaacggctaatgggcgaagacgacggttcgtcgttccttccgtcgaaggccgaacttgcccgcgacatttggcaacgtatgcagggcacgacccttgcaaacggcgtgaccattccgccgacccccgaagaatacgcgaagcttgcgaagctttacgcggatgttcgcgggttcatcgaaaagccgcaaactaatgtgaacgtaacgacgaacgtacagcgtgtcgtcgaagttcccgttttccaaagtgaaggcgaatgggaaaacgccgccgcacgtcaacagcgggaattgttagaaaatgcccgcactcgccattaaagcgcccgaagcgccgccgctgattctacagaaagcgccgccaatcgaagtcgtatttaagccgcttcccggttcgcagacgattgcgctttgttcgcacgctgcgcataccctgtacgaaggcgcacgcggccccggcaaaaccctaacgcagttaatgcgctattaccgtaatgtcggcaaaggttacggtaagttctggcgcggcgttatcttcgatcttgaattcgaccatttggccggacttgtcgccgaatctaaaaaatggttcggcgacaatggcaagctgaaagatggggcgaagttcttagaatcgccgtcgcaatacaaatgggtttggccgactggcgaagaactgttgtttcgccacgtaaagaaggtcgccgattacgaaggcttccacggccacgaatacccgtatatcggatggaacgaattaacgaagcatcctagcggcgacctgtacgacaagtttatgtcggtcaaccgcgttacgttcgatccgatcaaagacacgccgaaagacccgaagaccgggcgttatttgacgcctaacggtctgccgttgcccgaaattaagtgcgaagtattcagcacgacgaacccaagcggccccggtcataattgggtgaagaagcggtttattacgattgcgccgcgcggcactgtcgttcgtcgtagtatccagatttataacccgaagaccgaacaagaagaaacgcacgtaattacgcaaattgcgatcttcggttcatacaaggaaaacccgtatcttccggcgtcgtatatcgccgaactggaaagcattaaagaaccgaaccttcgcaaagcttggttgtatggcgattgggacgttaccgcaggcggcgcaatcgacgacctttggcaatcgcatatacacgtcgtaccgcgctttgtcgtgccgccaagctggcgcatcgaccgcacatacgacgacggcagttcgcatccgtttagtgtgggctggtgggcggaagcggacggcaccgaagcgactatcgttctttccgatggaaccgaatttgtgttctgtccgcaaccgggttcgctgattcagatattcgaatggtacggatgcaagaaggacgaaaagggcgaattcttgccgaacgtcggtcttaaaatatcggcgtcggacgtagcgcaaggcattatcgaccgcgaagtttcgatgatggcgaacggctggatttcgtcgcagccgtggcccggccctgcggataatcgcattcgacaagttatcgacgttgaactagacacgaccgaaaagcttatgtcgaagaagggcgttcgctggatggaatcggacaagtcgtcgggttcgcgtgttatcggcctacagcttttccgcgaccggctagaagcgtctgttaaacgcgaagggccgggggtatacttcatgtcgaattgcgttgcaagcattgatattttgcccacattgccccgcgacgaaaagaaaatcgacgacgtagacaca

SEQ ID NO: 20 - DNA, 43145 bp, Bacteriophage P1940
  source 1..43145: mol_type = unassigned DNA
atggttccacgcgatcccgaacggcggtagccgtggcgacgacgaacagtcgcgcaagatacgcggcggccagatgaaggccgaaggcgcacggcagggcatcgccgatacgttcttgccttggccggtctacgaacaaagcccgaccgattcgcaacaaatggtcgtaaaatggtgcggcctttatatcgaaatgaagaagccatcgcttcgcccgaagtctgccgaagccaaaggcggcgcatcggacgaacaaatagccttcggccagtacgcgcagcgcgtcggctatgggtgggccgtctgctatgattgggaacaggccgttagttaccttcgtagctatatcgaatgggggcagaaatgaacaaagacgaagccgccgcactgttcgaacaagtcaaggcgaaccgtgctaagattgacggatgccgaaaacaccgcttcgacattggcgacccgccgtatcgcttcggacagaagttcgtatgcgccaactgcgggggcgaaatggacgccgtacaggcgttccgctactgccaaggctacgaagcggcgggcggcgacccgaacgaagttataccgggcttccgctaatggattgcctgaaatgcgaactaacacgcgcgaagcttaaaacggctggcctgctaattgtgggctggccgttgtcgcgtattgctgaacacctttcggactgctacggcgaacggtactacgtcgaaggcgacaacctgtatcgcgcgtcgaagcttccgccgtatgaaccgcacttgataaggagtaatggcaatgacgcttgacgaagccaagaagaaggcgcgcgaaagccgttgtttcatcgtaacgaagcctgattgtttcttgctgtaccgcgaatgcgaaccgaagaacgtatgcgtcggaaagcgcaaggacgaaaaaggcatcatcgcgctagtgaaaaaagcttgcgcgaccgcttgacgtagtttcgaaaccgtcgtagactatgcccatagtcaacgaacaaggggcacgaaatgggcgcatacaccgtaacaactgaattcgaaatgaacgacggtcgcattctgtcgtgcgaatacggcgtatcgttcacccccggttatatcagcggcccgcccgaacactgctacccggacgaaagcgaagtaggcgaaccgacgtactatatcgacggcgaagaagtcgattacaaggatttgccgaaaggtcttgacaagatcgccgataagttgtacgaagccgggccgggcgaatacggctacaaagaaagcgaaccggactacgacggcccggacttcgaacccgacgactattactaaggagttaccgcaatgcctacccttgccgaactgttttggcacttcgtaacgctgtccagcggcgtaactatcggcctaatgttggctgcatggttgcgtatgcaatcgaaagtgaccgaagaaacctacgacaccgattgcgaattcgtaaccgaatatatcgccaacatggaaagcggcccgaagatcattcgtcgcccgctgtcgcaatggccgatatgggcggacagcattaacccggccaagacgaacccgcccgaacctgaaccgccgattcgcattgaacgaaattttatcggcaaaaaggattgacaaccattcggaaccgtcgtagtcttgttcgtaccaactggcaacctaaaggaatcgccgccatgtacgcacttattcttatcgcttgcactgtcgttgctgtcgctattcacttcgggcttatccgtcccgtaatgcacgccatcgaacgccagcgcgaagaatcgcggcgtcgtgcggcgcttgaagctggcttggccgctgcggcgcgcttacaggcgttcaacgcccgtaagccgtcgaatcatcgcggcgcaaagctgaacgccgaacgcgaatggcggtcgcaggaatgaagcgcggacacgtcatttacacgcacccggacgaactgtcgaaatgggatcgccggtttatcgaactggcggaacaagtcgcgtcatggtcgaaggggccgcgcaagcgcataggcgcggccatcgttcggcctgataggtctatcgcgtcgcttggctacaacggcccgccgcgcggcttcgacgatgaagccttcttgcgcatgacgcgcgaagaacaacacgccgtcgtaattcacgccgaagcgaacgccattgcgcaggcgcacgacggcgaagccttggccggttacacgctgtacgtgtcgccgctgtttccctgcgccgtctgcgcacgcttgatcgtgtccgcaggcatccggcgtgtcgtcgcctattgtgggcacatttccccggactggcgcgcgtctgccgatgaagccgaagaagtttttatcgctgcgggcgtcgaatgtctgttcagtatggattaacgaagatgaccctagaccattcgcaaatcgaaggactgttgttcttcgaagaccccgtaacgcataacgtaatcggcgcagccaaggccgcaccgctggacatggccggacacttcgtcgcattcgggccgcgcatcaccgttgacccgcagttgaagaacctgtttcttgccgcgccgacgctgtatcaaacgctgtcgcaacagtaccaagcgattcaaggtcttatcgaaatcgccgaaggcttgccgcagacgccggaacttgataagctgcaacggtcgttcgtcgaaatgcaaaacggcatgttaatggcgcagcttgtcgcgcaaaaaggtatcgaagaagtagcgaattcgcttgacaagctttagaagcggtcgtagaattcccaacatcgaaacgaaacaaggtgcccacaatgacccgcaacgctaagaattggttaatcgccgccgctgttgtcgcagcattgggcatcgtcggttcgatggattacgccgacgaagtgcgcgaacaggtttcatattgcgaaaacgtgaaggcgggcgtatggcccgactacaacggcacgtatgaaactgaatgcaccgccgaacgtctgaaagaatatcaagaaattttgcgttgaccgcttgacacgtcgaacggtcggcgtagaataacccctgtcgcaatcacgcgacgctaacttaccttcgaaggagttacacaaatggctagcaagaagtccaccaagaacaccgccgccgctgttgccgctatcggccttgccgaaatcgttgcagccggggcaaacggtctgtatactcgccccgaagttcacggcccgcttgtcgaacagggcttcgtcgaactgaaccccgccgggccgaacgaatccggcgaaactctcacccgcgccacgcagaaaggtatcgaaagcatgaacaccgcaaacaacaccgccgcccccgccgcttcggccccggtcgccccgtcgtccttcgccatcgaagacggcatcgccatgccgaccgcttccggtcgcggtcgtggcggcaacgtgtaccccttcgacgccctgaacgtcggccaatcgttcttcgtcccgaacaccgaagacaagccgaacgccgccaagtcgctggcttcgaccgtttccagcgcgaccgcgcgttacgccgaagtcgtcgaaggccagttcaagacgaacaagaagggcgaacaggtgcccgtgacccgcgaaacccgcaagttcgttgttcgcagcgtcgaaggcggcgcgcgcgtctggcgtaccgcctaagcgccccggcgtgcggcctacgggccgcgctacggccagaacgaagccccggcactgtccggggcttctttttgcctttctgctggcctacggccattttttcgggtactatcgggacaattcggggcgcagttcgccccttgcgcgtattaaggggctacgtagtgccattgaacaacgaagcggggcaggatatgaacgaacgtccgcagaagatcatagacgcaaaattgccgttaccttggcttatcggttcggcttgcgccgtagtcttttcaatgggcggcgtattcgtcaaactggacgccgtaggcgcatcgcttacgaagctggaagcgaagaccgacacgcgcgacgaacgaatttcaacgcttgcgcaatcgttgatacagcaggccggaaagaacgatacgcaggacgcgcaaattacccgcaacgccgcagacattaccgacttgaaacgcgacgttgaagacatacgcaagtcgcaacgttggatgccgaagtaatgaaaaagaaagtcgaactaatcgaagattggcgcaccgcccataagctttggtcggttcgactgtcggccatcggtgccgccgtaatgggcgtgtttaccgtatggcccgaatccgcgttgtatctttggtcggccatgccgtccgaagtgcgcgcgttgatccccgaacggttcgtatccggcatcgcgcttttcgtattcaccatgtccgcactgtcgcggatcgtcaagcaaaggccgaagaatgaacgaatcgaacgaaagcccgcagaagaaacagccgaataaaaagacgcttgcgggcgtccttggcgcaggtgccgccgcaatcctgctaggcgtagccgggcaaaccggctttaccgaacgcttcgaaggcatggttcttcgcggctaccttgaccctatcggcgttccgacgaagtgcgcaggcgatacatacggcgtcgaagtcggcaagcgatacaccatcgaagaatgccgcgaatcgctggaacagggtttgattaaacacgccgaacccgtgttgaagtgcgcgccgaacctgcgaacgcaaggctaccccttcgcactggccgccgcagtcgatcataactaccatttcggcacgttctgcggaacttcaatcgacgcagcgtttaagcgcggcgactatcgtacaggttgcgcacgcttcaacgaaaacgccgcaggccgtccgcaatgggtgtacgtcaaggacggcaagggcggttacaagacccttcccggccttatcacgcgggccgcagcgcgccgcgaactttgcatgaaaggggccggataatgtgggctatcatcgtagcgggcgcaaagcgtttcggcggctggattctggccgcattgtcgtttctggcaatgctggcgacagtttggcttacgtcccgaaaagtcggtaagtccgaaggacaagccgaagcggcggaacaacgcgcagccgaccgcgaaactatcgcagtacgcgaagttaacgaagcgcgcgaagcttccgaacgtcaaacaaaggcggtgcaaaatgcgaacgaagttgcttccgataatgctgttcttgacgacgacggcgtttctaagcggctgcgcgacgaatggtcgcgcgactaagccgccgcaatccatcgccgaaaccgtacaaacgaagcccgtagtaatcgacacggcttgcgattgggtgcgggcgatttgggtttcgaagtcggacgacataacgcccggcacggcgcgccaaatcctgaaccataatcaagccgtcgtaaagaactgcgggccgcagaaaccgcccaaggtcgattcgccttaacagaacgtcggccttgcggtatagtgaaggcaaatgcgaatgacaggccgacgccatgaccgaccaacgtaacgaatccgaagaaaaggccgcatatgcggccttgcttttgaaggaacgcgaccccttcaaggctgcgcttcaactgttccccgacaacacgaatcgcgccctatgggtggcgaatcattggccgattgacgccgaagtaaaggccgaacaagaacggctaatgggcgaagacgacggttcgtcgttccttccgtcgaaggccgaacttgcccgcgacatttggcaacgtatgcagggcacgacccttgcaaacggcgtgaccattccgccgacccccgaagaatacgcgaagcttgcgaagctttatgccgacgttcgcgggttcatcgaaaagccgcaaacgaatgtgaacgtaacgacgaacgtacagcgtgtcgtcgaagttcccgttttccaaagtgaaagcgaatgggaaaacgccgccgcacgtcaacagcgggaattgttagaaaatgcccgcactcgccattaaagcgccagaagcgccgccgctgattctacagaaagcgccgccaatcgaagtcgtatttaagccgcttcccggttcgcagactatcgcgctttgttcgcacgctgcgcataccctgtacgaaggcgcacgcggccccggcaaaactttaacgcagttaatgcgctattaccgtaacgtcggcaaaggttacggtaagttctggcgcggcgttatcttcgatcttgaattcgaccatttggccggacttgtcgccgaatctaaaaaatggttcggcgataatggcaagctgaaagacggggcgaagttcttagaatcaccgtcgcaatacaaatgggtttggccgactggcgaagaactgttgtttcgccacgtaaaaaaggtcgccgattacgaaggcttccacggccacgaatacccgtatatcggatggaacgaattaacgaagcatcctagcggcgacctgtacgacaagtttatgtcggtcaaccgcgttacgttcgatccgatcaaagacacgccgaaagacccgaagaccgggcgttatttgacgcctaacggcctgccgttgcctgaaatcaagtgcgaagtattcagcacgacgaacccaagcggccccggtcataattgggtgaagaagcggtttattacaattgcgccgcgcggcactgtcgttcgtcgcagtatccagatttataacccgaagaccgaacaagaagaaacgcacgtaattacgcaaattgcgatcttcggttcatacaaggaaaacccgtatcttccggcgtcgtatattgccgaactggaaagcattaaagaaccgaaccttcgcaaagcttggttgtatggcgattgggacgttaccgcaggcggcgcaatcgacgacctttggcaatcgcatatacacgtcgtaccgcgctttgtcgtgccgccaagctggcgcatcgaccgcacatacgacgacggcagttcgcacccgtttagtgtgggctggtgggcggaagcggacggcaccgaagcgactatcgttctttccgatggaaccgaattcgtgttctgtccgcaaccgggttcgttgattcagatattcgaatggtacggatgcaagaaggacgaaaagggcgaattcttgccgaacgtcggtcttaaaatatcggcgtcggacgtagcgcaaggcattatcgaccgcgaagtttcgatgatggcaaacggctggatttcgtcgcagccttggcccggccctgcggataatcgcattcgacaagttatcgacgttgaactagatacgaccgaaaagcttatgtcgaagaagggcgttcgctggatggaatcggacaaatcgtcgggttcgcgtgttatcggcctacagcttttccgcgaccgactagaagcgtctgttaaacgcgaagggccgggggtatacttcatgtcgaattgcgttgcaagcattgatattttgcccacattgccccgcgacgaaaagaaaatcgacgacgtagacacaagcgcagaagatcacgtttacgacatggtgcgttatcgtgtattgaaaggcgcgaacaaagcggctacgaaagtcaaagtatcaatgccaacttaaaggaatcgaaatcatgccgaacgtatcttttgtgcgtcctgaactgtcgaagttgcttcccatgtactaccttattcgggacgcaatcgcaggcgaaccaacggttaaagaagcgcggacgaagtatcttccgatgccgaacgcttccgaccaatcgaaggaaaacaaggcgcgttatgatgcgtatatcgcgcgggccgtgttctacaacgtagcccgtcgaaccctgttcggtcttatcggacaggtgtttatgcgcgatccggtcgtaaaggttccggcgctgctgaacccgcttgtcgcaaacgcgaccggatcgggcattaaccttacgcagctttcgaagaaggccgtatcgttgaacttggcgtattcgcgcgccggaattttggtcgattacccgacgaccgaaggacagggcggcgcgtcggttgccgaactggaagcgggcaagattcgcccgacgctgtacgtctatgcgccgaccgaaattatcaattggcggacgattgatcgcggcgcggaagaagttttgtcgttggtcgttatctttgaaacgtggtgcgttcaagatgacggcttcgaaatgaagaacagcggtcaattccgcgttttgcgtttggacgacgaaggttattacgtccatgaaatttggcgcgaaccgaacccgaccaaagcggacggtacgaagattccgcgcggcaattaccaacttcacgaagtattcaagccgaccgatgcaaacgggaatcgccttgacgaaatcccgtttatgttcatgggttccgaaaacaacgacgttaacccggataatccgaacttctacgaccttgcgtcgctgaacttggcgcactatcgcaacagcgcggattatgaagaatcgtgctacgtcgtaggccagccgacgcccgtacttaccggcctaacggaagaatgggttaacaacgttctgaaaggaacggtcaacttcggatcacgcggcggcattccgcttccgaccggggccgacgcaaagctgttgcaggccgaacctaacaccatgcttaaagaagcaatggacacaaaagaacgccaaatggtcgcacttggcgcaaagcttgtcgaacagaaagaagtacagcgcaccgcaaccgaagccgaattggaagcggcgtcggaaggttctacgctgtccagcgcaacgaagaacgttagcgccgcgttcgaatgggcgttgaaatgggcggcgcgctggatcggcgcgggcgacgctggcgttaagttcgaactgaatacagatttcgacattgcccgcatgacgccggacgaacgccgccagattatcgaagaatggcagaagggcgcgattacctttaccgaaatgcgtacagggcttcggaaggctggcattgccaccgaagacgacgcgaaggcgaaggccgacattgccaaggacaccgccgaagcgatggcccttgccatgccggacaacgtgccgggcgacggcaacacgcccccggctggtaatgtgggcaacgggggtgcgtaatcatggcgctatcggataacaagcgcctatacgacatttcaacgcggcttgccgtatatgtcgaaggcgtcaaagttcagcagtcccgccaattcaacttcgtattgcgcgatattagcgaagttctgaaaaagcttcttggtcgtgttcgttacaagacccttgacggtctttcgaaggcgcaactaaataagcttgtcgcagaactgcgcgaatcgcaatcgaagatttacagcgcgtacacgtcgcagcttatcgaacagcttaaagcgttcatggctgcggacttggaagtaaaccgccgcgcatgggttacgggctatatcgaacttgacggcgattcgccggacgaaattatttcggacgaagacgcaatacagttcttaatcgaagccaacgacagcggcgcaaatccgttgttcggcatcgcggccattactggcggcgacgaacgtatttggtcgcaagttacgaattcgccgcttccggcgaacgggctttatcttctgccgtttatcaagacgtttacaacgtcggcgcaagcgtcaatcgaaagcattattcgcaaggcatgggcgaaccgctggactgttgacgaaaccttgcgcgaaatcatcggcgaagaaggcgcacgccaaggcacgccgtcgcagcttgcgcggatcaataatcaagccgcgtcggttatccataccgccttcgcgcatactgcggcaatcgtagcggctggcgtagcgtctgcggttttcagttggtacatttggttttcggttatggatggcaacacgaccgaaatttgccgaagccgcaatcgcaagcgttatcggtttggggccgggccgttgccgcctgcgcacattcgttgccggtcgcatactgccccggcgaatacggctagtgacctaatcgacgaaacgttttatacttggcttgcgcgtcaaccgctggaagtgcaagacgacatattaggcaccgaaggcggcgaagctttacgcgatggcaaattgaaagcttccgatattccgaagtatgaagccgacgaaccgctaacgcttgacgaattccgacgcaagattaaacagattctttcccgctgatacggtgtatcggcataacctgtaggagtcctacgaaatggcactgaaaaagcgtattaccaaagaagaacattcgaagcttgccgacgcgctgaaattcgaatacgtcgaagacggcgacggtttccgtctggacgttgacggcgacgaagacaccggcccgcttcgtcgcgcgaaagatcgtgaagcgcagttgcgccgcgatgctgaaaagcgcgccaaagaagccgaagaccgtttggccgaactggaaggcgacgacgcccgtaaaaagggcgacattgctacgctcgaaaagtcgtggcaaaagaagcttgacgacgcgaacgccgcatcgcaagccaaaatcgacaagcttacgtcgcatacgacgaaaacccttgtcgataacgtcgcgctgtcggtcgcaaccaaaatcagcaacgcgccgtcgatcatccttccccacattcgcgcgcgcctgcaagcgaacttcgacggcgacgaaccgacgaccgttgttcttggcaaggatggcaagccttccgcaatgaccatcgacgaactgtcggcggaatttgttgcaaacaaggatttttctgctatcatcacgggcagtaaggcgtccggcggtgccggtaagccttcgcaaaacggcggcggtgccccgaagatttccggtcaatccgacaaacccgccgacctttcgaagatgaatccgcaagaacttgcggcgcatctgaaagaagcgaaggctactactgaataaggacgctttatcatggcactttccgacctcgcggtttactccgaatacgcctattcttcgttttccgaagtcctgcggcagcaaatcgacctgttcaacgctgcaacgggcggcgcgatcatccttcaaggtgcggcgcaccaaggcgactttagcgacgtggcgtttttcgccaaggttgcgggcggccttgtccgtcgtcgtaacgcctacggttccggcgctgtcgccgaaaaggtgatgaaacaccttgtcgatacttcggtgaaggttgcggcaggtacgccgccgattcgccttgaccccggccaattccgttggattcagcagaacccggaagtcgcgggcgctgcgatgggccaacagcttgccgtcgatacgatggccgacatgctgaataccggccttggcgcgacctacgccgcgcttacgcaggttgcggcggtcaagtacgacgctaccggcaacaccgcgccggacgacggcccgacgtggaacaacctgaacaacggccaagcgaagttcggcgaccaatcgtcgcagattgcggcatggatcatgcacagcacgcccatgcacaagctgtacggcaacaacctgaacaactccgaacgcctgttcacctacggcaccgtcaacgtgattcgtgatccgttcggcaagctgctggtgatgaccgacagtccgaacctgtttgcggcgggtacgccgaacgtctatcacattcttggccttgtgccgggtgcggtgatgatcggccagaacaacgacttcgacgcgatggaagaaggcaagaccggcgacgaaaacctgattcgggtttaccaagccgaatggtcgtacaacgtcggtgttcgcggcttcgcatgggacaagggcaacggcggcaagtcgccgaccgacgcggccctgttcacttcgacgaattgggatcgttacgccacgtccgaaaaggatttggctggcgtcatcgtcgaagttcactaaccaacgaacgaacgggcggggcttcggccccgttcgtttaacgttcccaaacgaaggagttacgaagcatgaaacctgcaaagattctgtttttcgtcgatggcccggcaccgacccccgaagatttcgccgcagccgccgaactgaacgcaagcgtttcgttccgcaacgcacgcgccgtaccgtccgaagcgcattcgctggaaatctgcgacggcgtggcgggcgcagttccgccgatctacgccgaaaagttccccgacgccgccgaagctatcaagaagaaggccgccgaactgaaagaacttacttcgaaggtcggcgacagtccggcaccgaaggccaagggcggcaagaccggccagcaagcgccgcagcagccgcagaccccggcccccgcaactggcggccagcagcccgcagcgggccagcaaggcggcgacgcgccgtcgtggaacccgaacccggcgcagtaaggccgggcgcagcgtagggcgcggcctgttcgcctagtgtgggcaggccgtttttataggcgcaacgaaaggacagacgaacatgcaacgcattgtctattttaccgcaggcattaccccgacttcgggcgaactggccgatattgccaaacttaacgcagccgccgaagccgcctacgaagtcaccgtagttaacggcgcagcgaatgcgaagtatggcgaaacgaaccgtcttattccgtgcgatttggtcgcgggcaccgttccgaccatttacaacgcgaaagaagttatcgaccccgacgcaatcccggcgcgcggtttgtcggatacgcaagccgttgtcgaaaatggcgaagcgttgacagttcccgttactggaacttacaccgataccgcaaccgttaccgtcgtcgatggcgctgtaactgccattgcactttcgtaaggattcggcgtcatggcaattactatcgtagtcgaagacggaagcggcgtagccaacgcgaacagttacgtaagcgtcgcggatgcgcgcgtatacgcgaccaatcggggcaccgaacttccgtccaatgacgacgaagtagccgcgatgctgattcgtgcgacggactacctagaagcgcaggaatgccggtatcaaggcaaacgcacgtcgccgacgcaggcgcttgcgtggccgcgtaccggcgtattcctgaactgcgatgaagtcccgtcgaacgttattccgaaatcgcttatcgccgcacaagttcaattggcgatggcgattaacgcaggcttcgacctgcaaccgaacatttcgccgcaggactacgtaacgcgcgaaaaggtcggcccaatcgaaacggaatacgccgacccggtagccgttggcatcatgcccacgtttaccgcagcgaacgcgcttcttgcgccgctgttcggcgaatgcgcttcgaacaagtttgcacttcggacaattcgggtttgacgtatggcacgcttcgaccgcgcgattcaaacggcgttgcgattgatcgcaaagaacggcgaaaaggtgaaatggcgcgtcattgacgacgcagccgcgcccgatccgtcgcagccgtggaaccccggcccggcaacgcccgaagacaaggacgtaactatttgcttcttgccggttgatcggcaaacgatggaaacatttacgtttatcaaaggcaccgaagttccgaagggttcggtaatggggcttatgggaaacgtgccgtttaatcctaacttgaaagacgtagttattcgggatggcgtagaacttcgaatcgcaaatatcgacgttctttcgccgaatgggcaaaaggtactttacacggtagtttttcaagcatgatcgaatttgaccaagcccgcgacgaaatcaatacgctgtttcttacggcgtggaacgctaacgcgggcgcggtcgtcggctatgttcccgaaattcgttggcagggcgtacaataccgagatttgccggacggttcgaagttttgggttcgcgtgtcgaaacaaaccgttttcgaagaacaaacaacgctttcaacttgcgaaggaaaaccgggacaaaaacgttatacggcgtcggggcttgttttcgtgcaagtgttttgcccgaaatcgaatacgcaagctttcgcacttggtcaaacgctggcgaagattgcccgcaatgcttttcgcggaaagactacgccggggaagatttggtttcgaaatgttcgcataaacgaacttgaccccgaagaactgtacgaacggtttaacgtcgttaccgaatttgaatacgacgaattaggttgaaggagttacgaaaatggccgattgcgctatcaacaaaatcgactcgaacattaccggactggcgtatgccgaagaagaatgcttgaagcaacttccggcgtccgtcacttggtacggactggaaccgaacagctattcggacttcggcggcgaactgtccaccgtagcccgtgcgcctatcgacccgtcgcgccagaacaagaaaggcacgattaccgatcttgacgcatcgggcggcttcaattcggactttacgaagtcgaaccttactcgcattctgcaagggttcttcttcgcagacgcgcgcgaactgccgtctactgcgccgctgaacgccgcagctatcgcaatttcggctgtcgatgctgcgacgaaaacctataccgttgcaagcggtggcgcggcgttcgctgcgaacatgcttgtcaacgcaaccggcttcgcaaacgctgcgaacaacggccttaaaaccgtcgcttcgtccaccgcaacgactgtcgttgttaacgaaacgcttatcgacgaagccgcgccgcctgctggcgtgaaactggaagtcgtcgggcgtcaactggccgcagccgatgcgaacatcgccgttacttccggcgtcgcttcgttggtcgtcaccgctggcgactttacgaccatgcccgaactgttccccggtcgttgggtgttcatcggcggcgacgcggcgtcgaaccgctttgcaaataatgtgggctacgctcgcattaagtcggtttcggcgaaggcgcttgttttcgacgatacgaccttcgcggctgcaaccgaaaccggaaccggcaagtcgattcgtctgttcgtcggcgtcgttatcaagaacgaaaaagacccggcccttatcaagcgtcgttcgtacaacatcgaacgcacgttgggcaacggcgaaaacggcgttcaatgcgaatacttggaaggtgcggtagccaacgaatttacgttgaacattccgcaggccgacaagctgaacgccgatcttacgttcatcgcgtgcgataacacgcaccgcagcggcgaccccggcgacgaacagaaggccggtacgcgcatttcggcaccgggcgaagatgcgtacaacacttcgtcggacatttaccgtatcaagatggcagttcacgacgacacttcgtcgaatcctgccgccctgttcggttacgtgtccgaagcgaacgtttcgattaacaacaacgtttcgccgaacaaggccgtcggtatcttgggcgcgttcgacacgacggcgggtaacttcgaagtcggcggttcgattaccgcttactttacgaccgtcgcagcggtgaaggcggttcgtgcgaatgccgacgttggtttgtcggttatcagcgcggcgaagaacgccggtttcatcttcgatattccgttgcttggtttgggcggcggtcggttgaacgtcgaaaaggacgcgccgattaccgttccgcttgaacccgcaggcgcggaaaacgaaaacggttatacgatgctgtacgaagtgttttcgtacctgccaacggtagccatgcccgattaagtcgggtacacttgaagggccggacttttccggcccttctttcatccatcggagtaaatcaaatgtctggactgtttaagcaattcaaaacgaattcggcgaaggaaaccgaaggcgtcgaaatcgaatttcccgaagcgcagaacgacgacggcaccgttcccacgttcatcatttcgcgcatgggcaagtcgaacaaagcgtattccaagtcgctggaagccgcgacccgcccgtatcgccgacaggtcgaattgggcaccatgaaaaacgaagtcgccgaacagcttttcatgggcgttttcgtcgataccatcctgcgcggctggaagaacgttcaggacgaaaagggcgaagccatcgcctattcgaaggacgcggcaatttcgcttctgtccgaactgcccgacgtttacgaacgtctgcaagaagaagccaagttgtcggccaacttccgcgattcggtgttggaaaccgaatcgggaaactgatagaagttctagcgtatctgttcgaactaggcccgcacgaacagaccatagcaaaacaggcgatgcggtcgggccagccgttacccgaccgcatcgccaacgcgccagaacttgaaccgggcttgcagttgtatttgcaagccttcttcgatttggatagcgaacgaacgcacgcaatgggattgacgccgattccttggacaagtattgcggcgtatgcgtcggcattcgaattcgacgaagaacagcgggaagacttgttttattttgttcgtaaactggattcggaacatttgaagaaactagaagcaaagcataaggcgaataaaggcaatggcaaacgaccttctaagtctggccgttagtctggaacgcaaggctaaggcaatcgacgaagcggcttctaaagcagccgtcgatactgcaatggctattgtgggcgacttggcgtataagacgcccgtagatacttcgcaagctttgtcgaactggcgcgttacgcttgattcgccagcaaccgggacgattgcaccgcattaccccggcattcaaggttcgtcgcaacgggcaagcgcagccgaaacgatcaacgcggcaaaaagcgtacttgcaaacaagaagcccggtcaagcgatttttattacgaacaaccttccgtatatcaaacggcttaacgacggatattcagcgcaagcgcctgcgggattcgtcgaacgtgcggtattgattggccgcaagatgcttgcgaagttcaagattaaggattaagacgaaatggccgaaaacatcgaaattaaagtacaggataaagtcgattcgtccatttcgaccaagcttaaaggcatcgcttcggatgcccgcaccgccgacagcgccgtaaaggcgttgcaatcgtcgttgaagtcgatttcggcttcgtccggtctttcgcgccttcaaagcgaacttgcacgtaccgccattctacagcagaagcttgccaccgaaacgcagaaaacgcaagtcgcaatggcgaacgttgaagcggcgttgcaacgtgctatcgcagccgaagccaaggcgaacgccgcgattaaccaactttccgccgcgcaatcgaaggccgccaccgaagcgcaacgtttggcgacggcccaacagcaaaccgccgccgcagcggcgcaggcgcaggccgcacaagcgaacttggccgcagcgcaaaccaacagcgcgaccgcatcgcagcggcttgccacggcgcagcaacagacgaccgcagcaacggccaacgccgccgcagcgcagacgcgcgcggctacggcgcaggtacagggccagaccgccgcgcagaaccttgcagcggccaccacgcgcgccagcacggcccaaacgcagggggcgaacgctgcgcagcggcttgccaccgaacagcagcgtacagccgtccagacggccaacgcggcagcggccaacgaccgggcggcccttgcagccctgcggctggcccaagcgcagcagcgggccgggcaggcgtcgcagaccgcaggccagcaaatcgccggatatgtcaaagccgccgcaggcatcgcaggcgtaacgctgtcggctggcgctattctcgcatcggcggacgcatatacgacgctgcaaaacaagttgcagaacgtcaccgaatcgcaatcgcaagtcgtaacgcttacgaaagaattgttcgacttggcgaaccgcacgcgcgcgggcgtcgaagaaaccgcgacggcgtttacgcgctttgatcgtgcgttgaagttcatgggcaaatcgcaagaagattcgttgcgtttgaccgaaaccattaacaaagcccttatcgtttccggcgcaactgcgcaagaagcgtcgtcggctttgttgcagctttcgcagggcttcaacgccggtaagctgcaaggcgacgaattccgcgccgtatccgaaaatatgccgatggttcttgacgcagtagcgaaggcgcttaacgtgcctatcaaccgcgttaagcaactttcgaccgaaggcaaaatcacgtccgaagttctgtttaacgcattccagcttatacagaagtcggtcgatgacacgttcgcaaaaacgacgcccacaatcggccaaagccttaccgtcttgaagaatagcgcaatcgaattcttcggcgaattgaacaaggcgaccggcgttacggctgcgctgtcgaaggcgattctttggcttgccgacaacatgaagaccgttgccgtcgtagttacggcgcttggaacggcgatgcttcttgcattcgggccgcagattgtcgcggctatcgtttccgcaacgactgccgtaaaggcattcaccgtcgcgcttgcgtcgaacccgattggccttatcgccatcgcactggcaaccgtcattgcgtaccttacgctgttccgcgacgaaattaacttgggaatcgacgacgttaccacgttgggcgatttcttccgcgcgaccttcgaaggcatcgggcaggttattagcgacgtgaccttgattgtcggccaattgtgggcagacatgaccgaaggcgcatccggggcgcttggcgaaatttcgtcgttcgttggcgatgctgtttccggctggacggaagactatacgtcgttcttccagaccgaacgcaccggatgggccgccgcgctggaaaacaccgcgaaagttcttgacgcaatcgccggattcattaccggccttgcaacgtttgccggtcgtgctatggccgaagtcgtgattaccgttcaaaacggaatcgcaaacggctataactatatcgtcggatggattgaacgggttacgaatctggcgattgaatcggcgaacaagcttcgcgcgatggtcggcaagtcggcatacgaacttgtcaacttcgaacgcatgggccaagccggacaaaccgaattcgaatcttggggcaagctttgggccgaatcgcttgaagacggctttaagtcccaaggcggcgcaatgcaaaaggtcgtcgaaggtcttatgacgcgcgcgcaacaaatcggcgcgaatcgtcgcgcaagcgaaaacgcttcgcttcgcggcgcaggtgcgaaccaacttagcgcagctaccgacgacaaggcggcgaaggccgcagaacgtcgcggcttggcgttggaaaagatcaatacgcagcttgataacgaattgaaccgcatgtttacgcttcaaccgcaacgcgaagcgcaagcgaaaatggatcaaatcgaagaatcgttgattcaacgtaaaatcaagcttaccgaagacgaacgcgcttcgatcatggcgaagattcaggccgtccagcaagcgcaaatcgtgcaacagaagttcgacgcgatttataacgaagctgtcggcccgcaacgcgattacaccgccacgcttgaagcttcgaaaaagcttcttgaccttggcgcgatttcgcaagaacagtattcgcgcgcagtaacgaaggcaaccgaagaattcaagaacgcgcaagacccgatgcgcgcgtataaccgcgaccttgaccaacagttgcagcttttgcagttgttgccgaagcaacgcgaaatcgaacagcaggttatgcaagtgcaaaacgacctgttgacgaagggtattacgcttaatgccgaagaacttacgcaactgcgcgaacggcttacgctgttgcagcaggcgaacgcgctttcgcagcaagaagccgcgttaatggacgcaagcgttacgaagcgccaacagtatatcgaccaattgaaggcgattaacgcgcttaaaaacaatccgcaaagcggtttcacgcaaggcgacgcggctaacgccgtaatgaacgcgaatagcgatcttgatttcacgaataccgatacgtatttcgaaggtcaagcgcagaaatacgaagatatgtattcgcgtatcgaccaactgcgccaacaggacttgattagcgaacaaaccgccgcaacgctgcgccaacgtatttggctggatcaacagaaccaaacgttaaacgccgcgtcgggtttcttcggacaaatggcgcaattgcagaagtccgaaaatagcaagatggccgccgttggcaaggccgcagccatcgcgcaagcgatgattaacacgtatcaggctgcgaccggcgcgtattcgtcgcttgcgtcgattccttatgtcggcccggcgttgggcgcggctgcggctgcggctgcgattgccgcaggcttggcgaacgttcaacaaatccggtcgcaaaataccgggtttatgtcgggcggttacactggcgacattccgacgaatgccgtagcgggtgccgtgcatggtcaagaattcgtaatgaacgcagcttcgacgaaccgcattggcgttgataacctgcaagccctgcaaagcggcgcggccagcgtccagcgcaacggggataatgtgggcaccggccaagcggccccggctgctgcgcccgaagtaaatgtaactacgccggtaactgccgtcgtggtacaatcgaaagaagccgccttggctgcgatgaagtccagcgaaggcaaagcatttgttatcgaaactatcgaagaaaacggcggcaccgtcgcccgaatcgtaggggttaaataatgggatacgcaataggcaccgtgactaaaggtagcggcggcgacgcttattatcagcttttagctattatcaaaactttggccgaagctaacggatggactacccttcgttatgtcaacaccggaacaaatcgggaatggatcggaaaaggcgtcggtctttccggtcttgaagaaatttttatcggtttcaaaacttacaacaacgttagcggtgattattacaattttcaagccgcaactatgattggctatgtagctggaaatagtttcgaaacgcagccgggaattcaaatttcgggcgtacctgcccacaataacgcaattacctatttcattactgcgaatccgcaacgcataaccggatgccttaaagtaggtacgccggtttacgaacatttctatttagggaaaatgtttccgtatgcgcgtccgggtgaattcccgtcgcctttggtttgcgctggaatgtttaacggcgcagaagcgaaacgtttttcggatacgaaccaagttttcccgtatccgggcgaatattattcgtcgcaatgctatatgtggctgcgctatcaaactggcgtatggactaaagtttggtcgtatccttttacgaatgcaaacacaaacaacggtttgccactggcagggccgcaaggaacgaatacgcttgttcctgccgacgtttattaccaacttgaaccgataattatttcgcaacttcaaactaacgcgggaagcggcaacgtttggggggaattggacggcgtttatttttgttccggcttcaacaatgggccggaaaatgtcgttcaaatgggcggaagttctgtcgtagatcaaacaggaatgacggtacttcaagctgtagacgcaattatagcagttggcgggcgcgctttcgtaatgtgccagaacgttaaccgtacaacttggcgcgattttgtcgctttggaaatgaaataatggcctactataacggaagtgccgcgactttcgcggatttgaaaaccgctatcgaaaacgcttgcgtcgctaacggctggacgctttctaacggcattctttcgaagaacggttgttttttccaacttgtcgccactacgccgcaacttacgttgcaaggcggaaccggccaaactggttcaaccttgaacggcggcccgtctagcttcgtaaaagtcatgtcgccaactggaacgcctatcgtttttccagttaactacgaaatccatgtaatgacttcgccagaagacgaagtttattgcgtaattaactacaatgccgatttttaccagcaactgtcgttcggaaagtcgttgatttccggcattggtggaactggcgcatggtttaccggaagttatgacagtcgtgtagggcaaagcggaaacggaaaccaattcgacatgaattccggcagtaacatggattctggcggaacccgtggtttttggggactggctggcggacttttcttcgaatcgttaagcgggggtagttacagcggcaattattttcattgcggacttgacgccgtaaattggtacaacacgcgcggttctaatcttggctatccgcattgcgccgcaatcattaacgcattaccaaatcaatcaaattcggcaaccgtacttgttccggtaaaaggaataaaaacacgcggaagcggcggccttactatcgtagtcaatccgccaagcgttcgttattgccgaatcgacaacttggaacccggaagtttggtcacatacggcccggatcaatggaaggtttatccgttttatcggaaagaccttacgcaacggcaaggatcgtcaagttctattcacagtggaacttacggatacgctatcaaatacaccggaagctaaacaatggccggacgaattggcgtatttacgcaaccttttatttatggtgaagataaccccgactattctaccgaacttgacaaatattcggaagttgaatatttgcctgtcggcatcgacgtaatcgggcgtcgtattttcggcccttatgcggtttggcgcgttcatgcggcgaaccgctggcctattgtgggcgaagaattcgaaaactttttcaaagattactatttccgaattcacgtatcgccgcaagaaattgatttgcaaacgattgcaagtacgcaaacgcgcgaagttgacgtatggaacgcatatccgtttacttccgcgatcatgcaagatattttggttaataatccgataggcgttgaaataatcgggccgaatccgtttaccttcccgccattgtttgaacagacttacgaaattgaagtaggaacttccggcccggcgaacattgatcttcaaattttgttcgactttgccaacgtaacgaatccgcttccggtacttgtaaccggcacgcgcgccgttaagttcgacattatccccgaaacgccggtaacggaagaatggcaatggcttaccgataatatcgtagctgttgacggcaccgaacagcgcatcgcgctgcgcggcgaaatgccgcgcgtcgaagaaaatttgaaagttattttcgacgattcgacgaagattcggaagttttatagcgatcttatggccgcagtcggtcggctttggattcctgaatttcagtacgcaacgcgcacgctttcggccagcgtaacgggcggctttaacctttacttcgacacgtcgaagaccgacattcgcgcaggtgaatacgttttgattcaaacgccgttgactaatgcacttgtcgaaatagacgtattgactgtaaccggcgctactgtaacttcgcaattgctatttgatattcccgcaggatcgttaatcatgccgggttcccccgcactgttgaatgacggttcgggactgtcgcgttatgccgttaacgaagttgccgaaacgacgttggtttgcaagatgcttcgccagcgtgcgcagcttgtgcgccccggatcaaccgtaacacttccgacgtatcttggcgttccggtcttcgaaaagcgaccgcttgccgatgaaatggtagacgacaacgtatctaccggccaacaatcaatcgacaatcaaaccggattgccggacattatttcgcgttgggactatagccgtataggcggcgcacgttcgtacaaagtgaaccgcattcaacgtcccgaagaaatggactattggaaaacgctatttgcgtatatgcgcggtgcggcgcgtaaagtttgggtgcccacataccgaaccgatatgcgattggttgttcaaccttcggacggcgcttcaactttcacaattgaaggtgtcgaatatgccgaaaaagtctttcctattgtaacgcatcgttatattgaagttgaaacggcttccggtattcatcgaacacaagtaaccggcgcagccgtcgcaggaaccggcctttctacaatcatcgttttcgatcctgcgttgcctgttggcgcaggctggacggacattaaacgaatttcgtttctgttgcctatgcgaatggccgaagacaaggtaacatggaagcattacggattagaaagtttacttcaactttcgttgattacggcggaaccttaaatgtccgattacgacgacaaagaaataagccagcaagacggcgcgccatacgaactttacgaatgggtcggaacttaccgtagttattacatgactacggatagcataccgcacgttttcaacagtacgacgtataatccggtttcgggtttgaagcgtagcacgttaaaagccggaacgcacgaagaagacaatatcgaccttacgattattgttccgattaccgaacagcttgtaaaagactacggatttcaaacgacgccgcccgcgcttgatttgacgatttatcgtttccagcgcgacgcagcggcatacgttccgtattggaaagggccggttgcttcgatcatcattagcggcgaagaagcaacgttgcggacgccaagcaagttcggcaatatcctgcaaggcaacataccgaacgtttacgttcaaccgccttgcaataacgttctgttcgatgaacgttgcaaggtaagtcgcgtatctaattcgctggatactgtcgtatctgcgataagttcggacggcttgcaaatcagcatcccgtcgattggcggtttccctaacggatggtttgtcggcggtgaaatcgcaattccggcacgcaacgaacgtcgaatgatcgttgcacaaactggcgcaattctaacggtcaactatggattttcgcgtatttctgtcggcacgtcgattcaagttacggcgggctgcgatcatagcttcacaagcgcgaacggttgtccgaagttcaacaaccaaataaacttcggcggttgcccgtttgttccgggcgaatcgaataacccatttacgaacggaattagctaatatgtgggtcgcaatcgttatcgcggtaattgcgttgcttatggtcgcgtttatgccgaaaccgaacgtcgaaaacgcgcgggcggcgaagcttggcgacttccaagttccccggtcgaaatacggcgatcctatgcccttagtgtggggaactgttcgccaaaagtcgccgattacgttttggttcggcgacttccgcccggttccgattaagaagaaagtttcttcgggcttgttcagttcgaagaaggttattacgggttataaaaactacgtcggtatcgactgctgtttgtgccttgggccgggcgtcgtacttcgtaagttttgggccggtacgtatcttgtttggactggcaccgcttcaggtattacgaatatcgtaatcaatcaacctaacttgtttggcggcgaagatcaacgcggcggccttcaaggtacgtttacattctacgacggtcgttacgatccgccgcgcgattcgtatttggcttcggttcttgatccgaacgttccggcgtacaacggttttgcgcgtgccttattcaagtcgttttatatcggcacgacgactaatcttgaaatgttcagcttcgaaatttcgcgtatgacttccggtcttcacgcgacatattcgattatgccgaacggtcttgatttaaacccgatggaaattgcgtatgatgccattacgcaaaagttcgggcgcttcggcaacttgccttcggttctggacttgccttcgttcgttgcgtgcgcgcaaacgttgtataacgaacaaatgggcatgtctatggccgcgcaatcggccattacgggcaaagacctgttagaagaaattatgcggcaatgcgacggcttgctgtatcaagacccggcaacttcaaagattgttgcgaagttgattcgtcaagactacgacattaacactttgccggttcttgacgaatccattattaaggatttgaagaacttttcgaaaacgacttgggatagtacgttcaatcaatgccgcgttacgttcaaggatcgcgcgggcgattacgacgacagcgtagccattgcccaagacttcgcaaatatcaactatcaacagcgcgtcaagtctaccgaaatttcttcgccgggctgtacgactgccgaagttgcaaacaagcttgcggcgcgtcaactttcgttgattagcgttccgttgtataagtgcgatattacttgcaatcgcaaggcttcgacgcttcgtccgggcgacgtgttcgttctgaattgggggccgttcaacctgcaaaaaatggtcatgcgagtttcgaaaatcgaccttggcgaacttacgtcgggggaagtgaagatttcttgcgttcaagaccgattcgctacggcgacacctacgtttgcgccgcctgattcttcgaattggacgccgattaacacaagtgcaaatgccgtgacggtgcgtaacttctttacgccgccgcacttcttggcgcgcgtttctccgaacgaagccctttcgacgttcgacagtcaaggccggttgtatatcttggctaaggggccgtcgtccgcttctatttcgttcgatgctatgttcagcggcgataacttcgctaccgatcccacactagccattgaagcggccccgtacaatggcggcggcacgctgtcggctgcatatgcgaatacagttgcggcagatacgcgacacgacacgacaggcgtattcaaagtgcaaggcgtatcgtcggcagacattgcgaacttgcaacaatatacgacgcttgaccaagcgcgcgacggttccgcgttgcttatggtcaataacgaactgttcgtttatgtcggcttcgttgacaacggcgacggttccgttactttcccgaacctgtatcgcggcgttctggataccgcaccggcaagccatgcggcgggcgaccgtgtttggttcgttggcggtatcgacggcttgattccgcagcttgtgaacaacagtgcgaccgggtacgttaagctgttggatacgacgacttcggacaagttgccgctgtcgtccgccccgaccgtatccgccgcgcagaatggccgcgcacgcctgccgtatcagccgcagaaccttacgcttgacggtagccgcacccctgccccggccacgggcgcaacgtcgatcacggcggcatgggcacgccgcagccgcgaagcgcaagccctgtccgtcttcaacgatccagacgccgggctagaaaccgggacgcaaacgcgcgtgcggtggcgcgtcggcggtggcggatatactacggtcatgctttccggcacttcgacggcgcttaacgtaaccggccttgtcggtacgttggaagttatcgtagatacgcaaatcacggcaagcgggctgttcagtacgaacagcgaacgcttgaccatgacgctatcttaaaagaacgcaagttcgccgttcttggctttcttcaaacgtccgcagtcgtacagcatttcgaccgcttcgttaatgtaccagtcgtaatttatatcgtcgggaaattcggtcggcaagtccattacaggacgcgcgccgtccgttttcccgactttgtttccgctggcaacgtaagcgatatgcccggcttcgttcttcgggtaataccagcgaacgaccttgcccaagaaacgcccgttcttttcgccgccgccgtgaacattcttcacgcatacgaagcgccggaagtcgcggcattccttaatcgtcttttctaccggcgttccttcgacaaggaaccgaataacagcgtcggaacataccaaagcttcggggttcttcgacagaatcgaattaagcgcggaaccgcgttcacaataagcgcccttcgtcttagcgcctaatttttcatccaagaagcgcgcttcggcgtcgccgccgtcgtccttgattgcgacataactattcacgtcgcgcgaatatacggctttgtatcgcgtttcttcggtcttgtatcccgtatgcgcttcccatgctgcaatcaagttgcggacttcttcatgccgcgacttgtgatatttcgaaatgaagccgtccgtattgccggaaataacttcgacgccgattccttcgattgcttcgataagcataagcaatacaagctgtccggtaatcgtcacttgcaacataagttgcggcgcgtacagcgttgaatatttgttgccaagtttgccgaagcttccgttaatcgtaatcttcaagctgtcggcaattactttccatttcttcgcgcccttgcggtcgccttctttcttgcacttcgccgccatcgccttagcgtgaattcgcgtttcgacgatcttgttataaaccgtcaagaacgcttcgcccaagtgcggcgggaacagcttttgattaaggattgtgcgcggatagaacgattctacgtcgttatccgctagaataatgtcttcggttgcgacatgcgcggtcttcttttctgtcgaatgaaggccgcccattccaagtttgtacgtcgatttgccgatagttactttcagcttttcaatttcggtcggcatgatgggcgaacccaagccgtccagatagaatgccgcgccgcgcacgacttctagcatttgctgtaactgcggcgtctggaaacaaacgaagtccggtacgttgtaatacaacgggccgtcgtctgttagtgtgggcttcttcggatagtaacccaacaccttttcaagttctttattgattaccgcttcggctacctgcgcatcggatttcgaccgaagttctacgccgtattcttccgacatttcggcccgcaacttcaattcgggcgcaagttcgttaaacagaagttccgtattcgcaaggtcgttgcagcagtacgggcgaacgattgcggcatcttcgcgcgtcaatacgtgcgtttcaggaaatggcaagtcctgcatacgttcgcaatgcagccgaccggcgtacagcttcaacgatgccgggcgcgcagtaacgccgccgttcaccgggcaaacgttgaacaagtcgatatggttgtagcggccaatttgtacgccgtacttcttttcgaagtcgaacggtgtaaccttctttgtaccgtaggccgggccgcttttaatgatgaagtccgaagcttctttaagcttggcgcacgatgcaccgcgcgccgcaagttctatcatgggcaagtcatacgatgcactgttgaagcccacaatacagaatcgccaaagcatccaaagaagcttcgtcgggttaaagtcatggtcgggtgaacgttcaaacgcgacgaactttccggtatcaagcgacttaaacgcgacataccaaaagttgatatacgtttcaacgtcaaagacgaagacgcttccagcgggaagcgccattagttcttcgtccgacatgaattcgacaggccgcaaagcatggcgaatgcttgcggccaacttatcgacgacgcggcttttcttggcaacgatgaagccttgttcgttcaacatatgacagccccttagaacggtatatcgtccgaatacggatcatccgaagttcggttaatgtacgtatcttccgactgttcagtatacgacgcttcggttccaagatcaagccccataactgcgccgcgcacgttgtcgccgtagaaaattactttgttcgtttcggcgtcgaaatgcgctttcttgaatgcgtgttcgacggaaagcaaaagctttgcactgaaccccattcgttccggcaagccttcgatacgatacgtcgaagcttcttctttgtgcatacgcgacaataccgcgccatcttcgaagaagacatggccgttcgggctgaacgattcgatagcacgaacgccccggtaaaagtcttcggggatcggccaaaggttcagattcggaacgtccagaaccgaagcataattcgggtaacgttcgccgtaaagctgcgacttgataaacgaaccgtcttcgaaatagaacgtcgccgatgactgcgaatagccgaacccggtaagcgccttcgatgccttcgcaatggccgacgctgcggccttcggaagcataaggccgggcggaaggtcgatgccgtgccacgcttccagcagggccgccccgttcgtcgctacggcgcttccagcttgcagcaggacggcggcataggtcgcattcggcgcgccgtccgttgccagccctgcgaccgcagccaaggccgctttaacccggtcgtcgatcacggcgcattgtggatcgggcggcatgatgggcacttcgtcgaacgctacgcacggcacaagcgcccggaatacgccagacgatacggcaagcgtgttcgctgtaagttgcgtaatcgacaattcgtcgccagccttcgacagtgcgtcgataaactgcaacgtatgcgggcacgcggtcaagtcttcttcaatcggcgcggccacggtcaagacgccatcgaaggccgccgcccaattgtgggcaatgtggccgaactggatatttaccggcccggccttcttttgcgcaaccgaaataaacttcaatgctgcgataagcgaagcggcggggttcgccgtcttcttcgctgtcgtaccttcggcttgcttgcgggcgcggcttttgcgcttcggcttttccggcgttgcaggaatcggaacgtcgttttcaatttgcgttgtcatagtttcaccattcagcggaaagaacttcgggatacttcttgttcacccaaacgcgaagccttgcgggcgttcgaagttcggatacacgttgcaaagcttgatacgtcgtcggcggcggttcttcgcggtgccgctgtcgccaccaatcccgcgaacgtttcgccgcaagtccggggtgttcaagcatcacaaattcgttaaacatttggaagccgcaaaagtacgatactttaatcattggcggctttgtcaagttgccttgtgcgtcgcgtttttcgtgaaggttgtatatcaccttttgtacgtcgaaatattcgactatcggggcatcgctgcgcaacggttcggcgacgcccggcgttgcaaacaacttcgtttcgaagctgaattcggcaccgcagttaatgcactggcgcgcggcggcatgattgtatacgccgcaaacttcgcaaatacgaaccggcgcgtcgccgccacctttgccggggcgattcggaatacgcgggtcgttgatcgggccaagccgacgaatgttcgccgcgaagtcgccgacaagacaattcatcttgccggtttcgggacttgggcgcgttccgcgtccgtacttctgtacgtgtttgcccggcgataacgtcgggttcaaatcgccgatgaagtcgattgccggatggtcgaagcccgttgtaagtttctggccggatacgataccgcgaagttcgcccgctttgaatgcgcgcaaacgttcggtattaaccttgtctttcaacttcgaatgcacgggcaacacttccagcccgtaggactgaattacgtttgcgacgtgttccgtattgtcaatgccagttgcgaagacaagccaagtcgaacggttatacgccatttccatcatttcgcggacggcgttaaatactacgtcgtcatcgtctgcggctttttcaagttgcttcgaattgaattcgccgccgattacgccaacgcctgaaatgtcaatttcggttttcgtcgggcgcgcgataagcggcgacaagtaaccttcggcgattaaccgattaaacgattcaacgccggtaatgtcgtaacaaatatcggtgaagattccgttatcggtaatcatgcccattttcatacgatagggcgttgcggtgaatccgataactttaagatgcgggttaatcgcgcgcaattcggcgataatgtactgatagaacgaatcttctttgtccgaaagcaaatggcattcgtcaatcaacagcaaatcacgccatccgaaatggcgaagatgcggcgggcgtccgtcgttctgttcaagcgcctttttaatcgccggggctacggattgaacgccgccgaatacgataggcataatcatttcgcggctgttcaagcctgcggaatagataccaaggggcgcagtcggccaaaccgacattagcttttcggcgttctgttcgatcaattctttaacgtgcgtcaacatcattattcgctgattcggccaaagtccgaaaatgcgacgaatgaagttcgcaattacaacagatttgccggttccggtcggcatagcgacgaccgggtttccgacgtttccgcgctggaaatagtcgaagattgaatattcggcttcgtcctgataccagcgcggtacgtagatactagacattttgcgttgtcgccgtgataggtacgtaagacgggcaagcttgcggtacgaagtcgcggggaattacgccgttatgtacgtcgcaaaaccattcgccgttttcgaccggacgggccgccttgcagctacgacagttcttttcaggaatcgcgcctttgtggcaaatgtccttcgccgcgcaatacgtgcaatccttgaacgtcggattatcggaaagacgcggcggcggttcctgcgacagaatgatttgttcggccttttcccgcatttgctggcctaaccgatgatccaacttcacaagttcgacgtgtaacgaatcgtcgttcttgttaatgttgaagtacagtacgtaacggaatccgtatgccgcgtcgcttccatacgttgaagtttggcaaaaatgctgcggcttcgcaacaggcataccggcttcgccaagcttgttaaagcctgcgccggttccgttcgtcttgaattccagcaatacaggttcgtcgattccatagcgcgccggaagctttgcgatgccgtcaagcgatccaccgaaatgcccattcaccgccgacacgcggtattgtgggaattccaagccgtccgccttcgcgcgtgcgacgtgttgcgtatagtacggatgttccttcgtaatcggtgacgaaaggccgtcgccttcttcgccgggcttcgcaatccaatacgaatcgctttcggcgtgatacataaggccgtcgcggttttcgtaccaaacttcggccccgatgccttccagccattcgataaagcgggcttcttcacgatgcccacgattaaacagccgttgcttgcgtccgtccgtctgttcgcggaacgtccatcggaacagataccaaagcttgcgcttgcagccgtcgccgatcaacgacgcgccaaggtgccagcggtggccgccgtcataggtgcgaacgcaatattcgtctatgtcttcaaggatgcgcttagaaagcgccttcgctacgccgggcgcgtcaagtgcgacgttttgttttccggcgtcgggcttcgtcgctggcgcgtcgttcagcgttaattgcgcgttcggttcgcttttcttgcttggcatcgttcttcacctttcgccggacaagtgcggcgtaattgttcgttagatagtcggcggaaagcgtcgcaacgtctttaagttgatccttcgataaccaactgatatggcattcggaagcgtctatgccaagttgcgccgcaagccaattgtacgccttcgaccgtgacattaagccagtttgccaaagacggtcgaattcgtcatgcgcttttgttcgaagctgtcgcgtagcacggtcggccatacgaccaagcggaataaacgtgccggggtgacagccgacagcggcgcgacagtcgttgcaaaaataaatatgcggccaatcgccgtaacggcgaccgtaaatccggtcgtttgttgttagttcgatgttgaatgaacaacaggtatcgcattgttcaggtacgggcaatgcgtctttgattttcgacatacttacgcttttccccataaaagaacgccggggccggtaaaagccccggcgatgttacgccgctacgctagttcgtcttagcgtgcgccccaaggtgcggcaccgccagccggtgcgccgccctgcggttgctgctgccagccgcccggctgtccgccctgcggggccgcgttctgctgcggctgctggccgccccaagctgcgccgttgccctgcggctgctgcggctgctgttggggctgctggccccatgccgcgccgccttgggccggttgctgctgcgcgggctgctgctggccctgcggctggccgccccatgcgccgccctgcgcgggctgttgctgcggctgttgaccgaagccgccttggccctgcggctgctgtccgaagcctgcggcggcctgctgcggctgcgccggggctgcgccctgtccggccttgcccggttcgttgccgttcatgtcgaacacctttttaacttcggtgtactgcgggtcgttcttctgcggcccgacttcgataaggaacgggattccgtgaagctgcgacgaatcgttgatttggaacacgccgataacgtggcagactgcggacaactggcggtgcgcgatttcgaccgtctgttggttcgtatggtacaggttcaggcgatacgcgccggtcgtgccagcctgcgggccgtcgatgatccgcaagttaagttgcagataaccgccgtcgttcgccttgtttgccttcacttcggaactttcgacgataaccggatgcttgccgataggcaggcttccgacgccttgggtcgggtcgtattgctgcgcgttgaaaggttgaatcagttgcatggtatttaccttttcgaaaagtcttcgccgttggttacggtggcaaagttaccgtttttggctgcgccggtaggattcgaacctacgaataccggaatcaaaatccggtgccttaccgcttggcgacggcgcaaaagcttattgcatcgctttcgtgaaaagcgccgacaaatcgggcggttcaagttcgcccaagttgcccaaacgatcacgcgcgaacacttcgggaatttccttcgtccgcaacgcccgaaccggcttcggctggcccggtacgatagcttcgcccaagtgcaacacgttgtcgaacaggtgcggaacctttacgttaaggtctttgccggggaagaacggtcgcttttgcatgatcggttcgtatacgacttcgccgccctgcaagatggtttgccgtccgttttccatgacgccttgtttcgcaatcattacgatatgcttttgcggcatgtaatacaagtcgttgcaaatcttcatcgtgcgttcggacatattgccgtatgccttcatgccgtgtttgaccttcgacagttcttcggccaagatgatttcggcaatgttcgaaatactgtcaatgcccaaggtatcgaagttcgcggcttcgcgcgacttcataaaccattcgaagaattcggtaatcagcggcggggaatacgcttcccatgcgggcacattcgaaccgcgcatagacaacatgccgggttcagtgaccaacagcacggggcgcggcgcggtgttgataagcggcgtcttgcccgaaccgggcgaaccgaatacgacggactttacgccatagcgtcgggccagttgcgacgccggtttaagctgcgacatttgcattttgtttactccgattaaagcggcattattgacgacgccgacgctttcgctttcccgactgtccgttatggcactatgcgacgcgatgcgcggcccggactttcgatgccgtcaagaatgccgccttgattgtgggcaaggcggcaagtgcattacttcttcgccttcggttccttgatttcaagggtcggcgtaccttccgacgtaacgataacgtcgtcgatgatcttgcggaagttgtcgggcagttgcttgtattcggtaagcgaaagttcaggcgtccacttaaccaaacgttcggcgatcaattcgccagcctgtccggtcttttcgatcttcgacaacgccttttcaatgcgcgccttgtcggtcttgccttcggcgttctggatgaagccgtagcgaaccggaaccttcatcgtcgctttgtagccgccgccgagttcgacgttttcggtcgtgccggacttcgccgggtcgtgcatgaacatcacggccagcttgcgggcttccaattcggcttctttggcgacttcaagcgcggccttcttcgcctgccaatcgaccaacagacggtcgcgttcggcgatatattcggcttcgctgtagttcttgacttcgcccgtttccgggttcgttacctgaatgatattcggggtcatctttgcacctttcttcgttgggccgccgcacgttgcgccggtatgtgcgtaatgtacgacggcccgtttcggttgtcaagccttttgttcaagaatttttcgttcttcgaacaagtcccgattgttcgcgtcgtgttcggtgaacttctgcgggaaccgcttacgaagcttggcgatgttcacggcctgcgcttcaccgaagttcgaaccaatggcgcgaagcaacagcgcatcgtaccaaaagccgtcgccgacttcttcaagcgcgttcacgtcgtcgaatacggcaccttcggcggtcgccgacagggcttccagcagttcgcccgcttcggtcgctttaccgatgatcgcatgaacgatattgacggcgcgcgcgttggcttcgtcggtgccatcggtggcgatccaatcgggcagcttggcaagcgtgccggtgttgtcgccgggggcgggaacgccgcagtcgcggccatagaaaagcgtcttcttgatcgcgtccagcttcaccagtgcggcgacagcttcggcgatggtttcgcggaagtagccaagcgacacgcggtcgccgtgatagctacccgacgcggttacgtgcgcttcttcgatatagtcgaaggtcttttcgggttcgttcattgcttgcacctttcaaagtcgccgggcaccgcgccgcagcgttccgacactgtagcgccgggcatgttgcctgtcaacaaaattttgtcttgcctgctagaattttgtcgggtatagtgtcgttcatcttgcccacattgaaccgccgacatggtgaaaacatggccgaagttaccaaactgcgggatgaaacccgcgaactgttgttgaaccgcccggcgtcgatagacgttggcaccattgcggaagccatcggcgtttcgaagtcttgggttaattcctttgcgcgcggcgacataccgaaccccggcgtcgtcacgattgaaacccttaacgcttttttgaagaagtgcgcgaagaaggcgaattaagaatgtatcaaaacatacctatcgaaatgcggacatatccgcaatgggttatgtggcggtacgaagacacggattcgaagaaacctactaaggttccgtattctgcccgtaccggcgcactagccagcgttaccgattcgaacacttggggaacgtttgacgaatgtttgcacgcgcttaattccggctggtataacggaatcgggttcgtgttgaccgacgccgacccgtattcgtttatcgaccttgacgacacgaaaggcgatcaaacggcgcttgatcgtcaaatcaaaatctacaacgaattcgacagctacgccgaacgttcgccgtccggttcggggctgcatatcattgtaaagggcgcggttcccgctggccggcgtcggtcgtttattgaagtgtattcgtcgcttcgttatatgaccatgacgggcgacgtttaccgcaatgcgccaatcaaagaacaaaacgaactgttgaacattctttggggccaaatggggcaaggttctgtcgccgttgcgcattacgcaagcgtcgccgaagccaaggaaaccgacgaacaggtttataaccgtgccgtcgccgcagccaacggggataagttcgccgaactgttcgcgggtaaatgggaaggcatgtacgcttcgcagtccgaagccgacttcgcattggtcgatattatcgcgttctatacgcagaaccgggcgcagattgcccgcatgttccgactgtccggcttgggccaacgtgacaaggcgaagcgtgacgattacgtgtcgtacatgctgaacaaatgctttgatcgcatgttgccgcccgtcgatattgacggattgaaaaacaagcttgacgaagcaatagccgcaaaagaagcccgcgaccgtgccgaagccgcatcgttgaataccaacgttccgcaagcgccaatcgtcgcgccatccatccccgaaacgtcgaaggtgtattcagtgccgcccggacttgtcggcgaaatcgcccaatatatctacgcacaagcgccccgcccggttcccgaaatcgcgttggctggcgcgcttggtcttgtcgctggcatcgtaggccgtgcgtacaatatcagcggcaccggccttaatcagtacgtattgctgttggccccgaccggaacaggtaaagaagccatcgcatccggcattgataagctaatggcgcaagtaatccgcaccgtaccggctgcaagcgacttcatcggccccggcgaaatcgcatcggcgcaagcgatcattaagtatatgtcgaaggggccaacgtcgttcgtatcgttggtcggcgaattcggcatctatcttcaacaaatggcaagcttgaacgcgccgccgcatcttttggggctgcgccgtttcatgctggacgcttacaacaaatccggcgaaggtaaggttcttcgtccgtctatctattcggacaaggacaagaacactaccgcagttcttgcgccgtcgttttcgttgcttggcgaatcaacgcccgaaaagttttacgaaggtttgcacgaaggtttgattaccgaaggtcttttgccgcgctttacgatgattgaatatcatggtcaagtgccgccgttgaacaaagccggggcgcgcgtgcaaccgtcgttcgaacttatcgaccgcctttcgacgctttgcgcgcattcgcttatgttgaacagccaacataaagcaatccatgttcaattcgccgaaggcgtcgaacaagcttccgacaagttcgaagaacattgccgcaataacgtaaacagtagcgaccgcgacgttaagcgccaactttggtcgcgcgcccatatgaaggcgttaaagctggccggtatcgtagcagtcggcaataacccatacgaccccgttattacgtcggacgttctgtcatgggcaaccggcgtaatcgttgcagacgtgcgcaacttgcttgcacgcttcgacgctggcgaaattggcgtagacaacgacgaaacgaaacagcttgcgaaggtaattgcgacggttaaagatttcgtcgtatcgccttggccggaagttgcgaagtatgcaggcgaaggcgcaagcaacttgcattcgaaccgcattgttccgtacagctacgtacagcgtcggcttgccgccgtgtcggtcttccgtaaagatcgcatcggcgcgtctggcgcaatcaagcgcgcattgaagacgctatgcgaacggggcgacctgcaagaagtgtcgcgggctacgctgtcgaaggactacggaacgtccgccgtcgcgtacatgatcgcgcatccgggcgtcttcggcctgtagcggggccgggatagtgtgggcagaactggccgccttcgggcggctttttcgtgcctgaacgaaacataaataaagcgacgaacggtcgtcgtaggtcttgacgaagcttcgaaactatcgtacaatcgtcgcatacaagaaaggagtttcaacaatgcagcatcccgacgacgtagaatatttcgaacgtttgcgcgccataggattcgaaatcgcaaaggctaacaacattcgttgccttgtcatagaacctaagcgtcgcgcaggcggtgcatacggacttgcgtatttgtctgaatgtcgaatcagcattgaagttcgcggcaaagaacttatgcgcgatggcggcgaatgggcgaagaatcgttatcgccatgcttgcaacttgcatacgttggcgcacgaattggcgcatttgcaagaacaccaaacgcacggcaagaccggacacggcccgcgcttccgtacttacgaaaccgcgttacttgctgcggttatgcagcttgacgcgacttccccacattaaccgaaggtgccagctatggaaatccgcatagacaacgtgaacgaagttctagccgcaatcggcttgaccggacagcacgaacgcaagggccaaggctggcaccgcgtttacattcacgccccgcaagaaggaaccgacgtaacgttgtaccttggccgcgtcatgtttcaacatggcgtattccaatgggtgaaatggtgcgtaccgccgaacgaaggcgaattgcaggattacgacgtatattggttccgttgggccgtatacaccgcaaccggcaagcatctagggccgaagtcttgggcgcggttgaaggccaaggcgcaggaacgcgcgcaggccaagcgcgacgccgccaaggccgcacgggacgccctgaacgccgacagggtagccgcaggcaagaagccccggacgcgcgcccttgcgcctgtcaatccgcgccgggcggcgtgcatgatcgtcggcgaatggctgtccgccgaacttggccgcgaagttcatttgttcgcattctaacgaaggagtattgaatatgaccgcatttattgtcgcgctttgcgcatctttggcgctggcgttctggcgtctggccgctactgcattcgaagccgcttactactgcgcaaagaacggtgaacgttcgaaggcatggcgcttcatccttcgcggtatcttttgcgcgttttggctttcgctaatgattgcgcccgtcgttcgtttcttcgatagcttcgacgtgattagcatagacgaagcgccgcctactgttgcgccgaagcgttcgacagaccttcgcgtataatagacgacgatccgtttaacggtgccgtataacacgcaaagccttgatacgcctagctttcagggcatttataacaagtataaagtttaacggcaaagtcacccgatcccccagcttgtaacctaataaccgttatcactaaataacactacttttcagtattatacttattatactttttatatttcttttattttcaatggtttaggacttttacagccccttcaatccgtataatggccccggaacgatgcgttacgcttgactaacccgttatcacctgatagagttacaaacgtcataactgttaaggagtgttcgaaatgtcgtacccaatcgttcaagcgtcgccgacggcgatggaaaagaaggaacaggccgaacgcagcgcgtacccgttcgcagaactggccgtaggtcaatcgttccttgtgccaattgccgacgtgaccgaagtaaacttgcgcatggccgtaagtcgccagaacaaaaagaaggacggcaagcgttttaccgtcgtcaagcatggcgacccgcataacgtgttcgaagtcgcacgcacggcatgaacgcgcgggccaatgtgggcaagctgcaacgggtgtttgcgccgcattacttgacgcttcgcgcgcaatggccgcaggcgttcgcaatcaaaccaacacgcggcggctatgaagccgtcgtattcatcgaaggggcgaccaatgtacgaaatccagaacgggcacaagatgccgaaggcgcgtcgcaaggctggaagcgaaccgccagcggtgaagaccgcatttaacgaatacgcggacgcatacaaagctgtttacggcgtgcgtccgctgtcgtatacttacgacgcagcaacgaagtttattcgcatcgaaaacagcggcggcgtaagcttgtcgcgtttgcgcgaaatgacgaagcaacttcgttaccgcaaaggttgacagcttcgaagtttcatcgtagtgtgaccatgcgaaccgggcgcttcccggcatttcaaaggagttaacgcaatgtgcatcgtttgcgaaatcaaagccgatttgtcgaagaccaaagcgaccgccgaacaggccgccgccatcatggcgaacgttgaaaagctggcccgtgcaatgggcggcgttatcgacgtggtagaagctgcgcacgtgcgcaagcccgacgtgttcaagccggaagaactggcgaccatcgccgaagccgaagaactgttcgcgcagtccgaagccctgcccccgttggccgccgccctgttgggcgcgctgttgggcggtagcgtgaaagtcgaagtcgcgcatatccagatgaaggacggcgagaatcccgaacaggctatcgaacgttacatggctgaacgtaacgccgaaggttcgacgaaacattgaccaaacagccccggctagtgtatagtcggggcttcttcgtaggggaacgaaacagacatggccgacgaaatagacgcaacagccgaccgcatggacaacgaactatcgttgattctggcgaacactagccgccttgccgcgcgataccgaaaggttatcccggcgaatgctttttctgcggcgaagaattcgccagcgtcgtcgaagtgaccgacccgcgcagcggcgaacgtgtcgattcctgcgggcgctgtcgtgacgcaaggggcataaaatgacaccgaacaaacttgcgaaggaatccgaacattcgcaacaggtcgcattgttcgcatacgtagctgtcgcgtacttgcacggcttcgacgtagcggacgaatggtgcaagaccggcaagctaccgaagcgcgatccgaacgcaccgccagccgtcccggcgcttgaatggttccacgcgatcccgaacggcggtagccgtggcgacgacgaacagtcgcg

SEQ ID NO: 21 - protein, 84 aa, unidentified
  REGION 1..84: note = the amino acid sequence of a gene of a bacteriophage
MPIQIVESSPKAKEVIETKREQRAEMYPFEQLEVGKSFTVPLDECNWKSLRIITYKRNAKYKGEREFAFIKHDDLKLAEVARLK

SEQ ID NO: 22 - DNA, 255 bp, unidentified
  misc_feature 1..255: note = the nucleotide sequence encoding amino acid sequence of a gene ofa bacteriophage
  source 1..255: mol_type = unassigned DNA
atgcctattcaaatcgtcgaatcttcaccgaaggcgaaagaagtaatcgaaaccaagcgcgaacagcgcgcggaaatgtacccgtttgaacaattggaagtcggcaagtcgtttaccgtgccgcttgacgaatgcaattggaaatcgcttcgaattattacgtacaagagaaacgccaaatacaaaggcgaacgcgaatttgcttttataaagcatgacgacttgaagttggccgaagtggcgcggctgaaatga

SEQ ID NO: 23 - DNA, 42708 bp, unidentified
  misc_feature 1..42708: note = the genomic sequence of a bacteriophage
  source 1..42708: mol_type = unassigned DNA
ccggcgatagcgtcgggttcaaatcgccgataaagtcaatcggcggatggtcgaaacccgttgtaagtttctgccccgataccaagccgcgaagttcgccagctttgaaagcgcgcaaacgttcggtattcgtcttcgaaggcaacttggaatgaaccggcaaaacttccaagccgtaagactgaattacattcgcgacgtgttcggtattttcaatgccagttgcgaagataagccaagtcgaacggtcgtaagctatttcggtcatttcccgaacagcgttaaaaacaacttcgtcggtatctacggcggcttctagttgcttgctgttgaattcgccagccgttacgcctactttcgacaagtcgatttcggttcgcgtcggccttgcgataagcggcgacaagtagccttcggcgataagtcggttaaacgattcgacgccggttatatcgtaacaaatgtcggtaaaaattccgttgtcggtaataagccccattttcattcgatagggcgttgccgtaaatccgataactttaagatgcgggttaatcttgcgaagttcggcgataatgtattggtaatgcgaatcttccttgtcgcttaacaaatggcattcgtcgattaacagcaagtcgcgccaaccgaaatggcgaagatgcgccgggcgtccgtcgtcttcttcaagcccgcgtttaatcgcaggcgctacggactgaacgccgccgaatacgattggcataatcatatcgcgggaattcaaacccgccgaataaatgcccattggcgcggtcggccaaatcgacataagcttttcggcgttctgttcgattagttctttaacatgcgtaagcatcattattcgctgattcggccagtaaccaaaaattcgacgaataaagtttgcaattacgaccgactttccggttcccgtcggcatagcgacgacggggtttccgaccccgccgcgctggaaataatcgaatattgaatattccgcttcgtcttgataccaacgcggaacataaatattagacattctttgcaaccgctgtaattggtgaataagaatcgcaacccgtagcgatgaaatcgcccggaattacgccgttgtgaacttcgcaaaaccattcgccgttttcgacaggctttgcggccttgcagcttcggcagttcttttcaggaatcgcgcccttgtggcaaatatccttcgccgcgcaatatccgcacttatgaaacgtcggattatccgacaagcgcggcggcgcttcctgcgacagaatgatttgttcggccttttccttcatttgctggcctagccgatggtctagctttacaacttcgcaatgcaagtcgtcgtcgttcttgttaatgttcaggtaaagaacataacgaaaacgatattcgttgccatacgtcgaagtttgggcgaaatgttgcggcttacttactgccattccttgcgacattaagtccgaaaagcccttgcctgttccgttggtcttgaattccagcaaaacgggttcgtcgataccgtagcgttcgggaagccgggcgataccgtcaagcgacccgccgaagtgccccataacgccggaaatgcggtattgtgggaattccaagccgtcggctttcgcgcgtgcgacgtgttgggcgtaatacggattttcattcgtaataaggtcgcagcccaacggcagttcttcgccttccttcaatacgccgtaactgtcgctttcggcttggtaaaagaagccgtcgcggttttcgtaccaacattgaacgccgatgccttccagccattcgataaagcgggcttcttcacggtgcccacgattaaacaagcgttgcttgcgaccgtccgtcttttcccgaaaacaccaacggaagatataccaaagcttccgcttgcattcgtcgccaatcaaagacgcgccaaggtgccgacggtgcccgccgtcatacgtgcgaacgcaatattcgtctatatcttctttaatgcgctttgcaagggcggttgcaacgccgggcgcgtcaaggtctacgctttgccttcctgcgtcggatttcgtcggctgcgcgtcgttcagcgttaattgtgcgttcttcgcgtctttgctgttttgcatcgttcttcaccttgcgccgcataagggcttcgtaattgttcgataaataatccgccgaaagtgtcgcaacgtctttaagttggtctttcgacagccaagatatatggcattccgacgggtcgattcctaattggttcgcaagccaattgtaagccttcgcgcgcgacattaagccggtttgccaaaggcggtcgaattcgttatgggctttcgttcgaagctggcgcgttgttctgtcggccatacgacccaacggaataaacgtgcccggatggcaaccaacggcggcgcgacaatcattgcaataataaatgtgcggccaattgccataagttcgcccgtaaatcttatcgttcgttgttagttcaatgttgaacgaacaacaagtatcgcattgttcgggcgtcggcaatgcgtcttttattttcgacataagttcgcatactccttaaaaagaaacgccggggccggttaagaccccggcgaatctacgccgcgacggcgttacgccttaacgctggccccaaggtgccgcgcctgccggtgcgccgccctgcgcgggctggccgccctgttgccagccgccgccctgcggttgctgctgcgcgggctgttgggcaggctggccgccccatgccggttggccgccctgcggggccgggttctgcgccggttggccgccccatgctgcgccctgcggctgttgggccggttgctgcgcgggctgctgctgctgtccgccccaagcggcaccgcctgcgggctgctgcggctggccctgcgtggcaccgccccaagcgccgttcgactggccctgcggctgctgttgctgcggctgcgctgccggtgcgcctgcgccagccttgcccggttcgttgccgttcatatcgaacacctttttaacttcggtgtactgcgggtcgtttttctgcgggccgacttcgataagaaacggcaggttgtgaagctgcgacgaatcggtaacttggaacacgccgattacgtggcagattgccgaaagctggcgatgcgcgatttcgacggtctgttggttggaatggtacaggttcaggcgataagcgccggtcgtgccctgctgcgggccgtcgataatccgcaagttcagttgcagataaccgccgtcgttcgccttgttggccttgacttcggaagattcgacgattaccggatgcttgccaatcggcaggcttccgacgccttgggtcgggtcgtactgttgggcgttgaacgcttggataagttgcatgatgtttcaccttttcgaaaagtcttcgccattggttacggcggcgaagtaaaccgttttattgcatcgctttcgcgaacaatgcggtaaggtcgggctgttcaagttcgttaagattgcccaaacggtcgcgcgcgaaaacttcgggaatttccttcgttcgcagcgcccgaaccggcttcggcattccgggtacgcttgcttcgcccaagtgcataacgttatcgaacaaatgcggaactttaacgttaaggtctttgcccggaaagaacgggcgtttttgcataatcggttcgtaagtaacttcgccgttctgcaaaatcgtttgccgtccgttttcgacaagggcttgtttcgcaatcattacgatatgcttttgcggcatgtaatacaagtcgttcgcgattttcattacacgttcggacatattgccgtaagccttcataccgtgtttgaccttgcccaattcgtcggccaagataatttcggcgatgttcgaaatactgtcaatacccaacgtatcgaaattcgcagcttcgcgcgatttcataaaccattcgaagaattcgacgataagcgcgggcgaatacgcttcccatgcgggaacgttcgaaccgcgcatggacagcataccgggttcggtcacaagcaaaaccggacgcggcgcagtattgataagcggcgttttgccggaaccgggcgcaccgaatacgacggactttacgccgtagcggcgggccagttgcgacgccggttttaattgcgacatttgcataacttgcaccttcgggaatggccccggcgcttgtgggcaaccggggcggggttattacttcgacttcggcgcgacaagttcaagcgcgggcgttgcttccttcgacgttacaacttcgtcgataagcttacggaacttgtcgggaaggttcttgtattcggtaacggaaagttcgggcttccattttaccaaacgttcggcgataaattcgccttcggggccggtcttttcgattttctgcaaagccttttcgacggcttcttggccgcctgcgaagctgcggttaatcttgaaaacggctttcagtttgtagcctgcgccaagttcgacgttttcggttccttcgcgcaaagcttcggggtcgaaagcgaaagcgtttttcagaacttcggcgcgcaatgcggattcggcttctttcgctgcggcaagcgccttcgttgcttcctgccattgcagaatcaaagcgtcgcggttagcgttttcgttgaaagacattgttgttactccttcggttgggccgccgcacaattgcgccggtatgtacgaactatacgacggcccttcgttgctgtcaagccccttgttcaagaatttttcgttcttcgaacaagtcgcgattgttggcgtcgaattcggtaaaagcgttcgggaagcgacgacgaagcttcgcgatgttgaccgactgcgcttcgccgaagttcgaaccgatagcacgcagcaaaagggcatcgtaccaaaagccgtcgccgacttcttcaagcgcgttaacagcgtcgaaagcttcgccttcggctgcggcgcttagggcttccaacagttcgcccgcttcggtcgccttgccgatgattgcatgaatgatattcacggcggcggcgtcgtcttcggggcggtcggaaatccattcgggaagcttcgccagcgtcgccgcgttggcttccggggccggaacgccagtgtcgcgaccgtagaacatggctttcttgattgcgtcaagcttgttaagggcttcgacggcttcggcgatggtttcgcggaagtaggccagcggcacgcggtcgccgtaatacttatccgacgcggttacgtgcgcttcttcgatatagtcgaaggtctttgcgggttcgttcatacgttcaccttttggaagggccgggcaccatgcgccagcgttccagcactgtaaccgaccgcgcctttcctgtcaacaacaattgacagcaagcaagaagccgggtaagctgcccacaattgctagaaggtggcgttatggacattgaagaacttacgaagcgggtaaagaaagcaagcgtcgggcggtcgctgcgggcactggccgcgcaatgcgacgtttcgcacgaacttataagaaagcttttgcttgccaattctgcgccgaacataacggcgacgacttataacaagattgacaaagggttggcaaagaatggactttaacaatattccgcacgaaatgcggatttacccgcaatgggtcgtttggcgatacgaagacacggattcaaagaaaccgacgaaggttccgtattcagcaaaaaccgggcaccttgccagcgtaaccgacccgaacacttgggccgggttcgacgaatgcgttaacgctatgtcgtccggttggtatgccggaatcggtttcgtattgactgaaaacgacccgtattcgtttatcgaccttgacgacacaaaaggcgaccaaacggcgcttgaccgccaaataaagatttttaacgaattcaacagctacgccgaacggtcgccttccggttcggggttgcatatcatcgttaagggcgcgattccatcgggccgccgtcgttcgtttatcgaagtttattcttcgcttcgttatatgacaatgaccggcgatatttaccgtaacgcgccgattaacgattgcaacgaactattaaacgttctttggggccaaatggggcaaggttcggttgccgtcgcgcattacgccgggcttgccgaagccaaggaaaccgacgaacaggtttataaccgcgcagtcgccgcagccaatggcgacaagttcgccgaactgtacgcgggcaaatgggaaggcatgtacgcttcgcaatccgaagccgactttgccttggtcgatattatcgcgttttatacgcagaaccgggcgcagatttcgcgaatgtttcgcgcgtcgggcttggggcagcgcgacaaagcaaaacgcgacgattacgtttcgtacatgctgaacaaatgtttcgaccgcatgttgccgcccgttgacgttgacggattgcgcaacaagctagacgaagcaatagcaaagaaagaagccgccgacagggccgccgcgttgtcgcagaacagcgaagcgacgccgcatccgaaagccccggcccctaaccttaacgaagcttcgaaggtatacagcgtgccgcccggattagtcggagaaatcgcgcaatacatttacgcacaagcgccgcgcccggtgcccgaaatcgcgttggccggtgcccttggtttggtcgccggtattgtgggcagggcgtacaacatttccggcactggccttaatcaatacgttctgttgttggcaccgaccggaacaggtaaagaagccatcgcaagcggcattgataaactaatggcgcaggttatccgaaccgttcccgccgcgtcggactttatcggccccggcgaaattgcttcgtcgcaagcgattattaagtatatgtcgcgcgggccaacgtcgttcgtttcgttggtcggcgaattcggcatttaccttcaacaaatggcaagcgtaaacgcaccgccgcaccttaccgggcttcgtcgcttcctgttggatgcttacaacaagtcgggcgaaggcaaggtacttcggccttcgatttattcggacaaagacaagaacaccgccgcagtattggccccgtcctttaccttgcttggcgaatcgacgcccgaaaagttttacgaaggtttgcacgaaggtttgatttccgaaggtttgttgccgcgttttacaatgattgaatatcacggcgaacgcccggctttgaatccggggcacctgtcggcccaaccttcgttcgaacttatcgacaggctttcgacgttgtgcgcccatgcgctaatgctgaacagccaacataaggcgatacacgttcaaaccgacgcaaccgcccgcgaactgttccagcaattcgacgcgcattgcgacgcgaacattaacacaagcgaccgcgaagttcggcggcacctttggaaccgggcgcacgtaaaggcgttgaagctggccggaattatcgccgttggctgcaacccttacgacccgaccattaccgccgacgttgcgtcttgggcgattaaccttgtcgtcgccgacgttcgaaacttgcttgcccggttcgatgctggcgaaattggcatagacaacgacgaaacgaaacagcttgccaaggttatttcaacggttaaagatttcgtcgtttcaccttggccggacgttgcgaagtacgcaggcgaaggaatgtccaaccttcattcgaaccgaattgttccgtacagctacgttcaacgcaggcttgctgctgttgccgtctttcgtaaagaccgcatcggcgcaagcggggcaatcaagcgcgccttgaagaccctttgcgaacgcggcgatttgcaggaagtaagccgggccacactggcgaaggattacggaacaagcgccgttgcatacatggtcgcgcatccgggcgttttcggcctgtaacgcgcgcccgccagtgtgggcagaacgggccgccttcgggcggctttttcgtgcctgtaaaaaagttcgtcgtacctgttgacgtagcttcgaactgtacgtagaatacaaaccatcgaaacaaacaacgaaggactaacgaacatgaacgcaactgccgcaataatcgccaagctgaacgaagttttcgcccctatggacgcaagggttcttgaacagtcgcaggaatgggccaaaggccgcgcgcaagcaatccgcgatttcaaagcgtccgacgaataccaagcaatccgccgcgacgcttgggcactgtacgcaaagcttcacgctatcgcaggcggcaaaacttggtacaacgtgttcaacggcaacagcgccgccaatatcgaagctttcgtagccaagaactgcgccgctatcgccgacaagcgtaacgcaaacattgcccgcaaactggaaaaggctggcgttaccgaagtcgttagcgaagaattcacccataccaacgacggctttaacggcgtcttcgtcgtaaatacaaacgccggtcgcaagtcggttcgtattgaaaccatttacgcgggcggctacaacgttcaatgcttgcaccttcgcgttttggtgaaggtcaagtaaccccgccccggcccttggcacgcgctaggggccgcgcagcctgcccacaatgaccgaaaggagtaacaaccatgaacgacacgccttggccttgggaaccgataccggaaccagtcccgcgcaaaccgcttacagtggccgaagcaatcgcaattcttcaaacaatgccgcccgatgctactttgctttcggaaggctgcgattgtatcgacgattgttacggtatttcttacgatgcttccgacaacaaagttctaatggaacgataatacttcacactttgaccgcttcggcggtctttttgtttgtacggcgtataatagcgacaggcgttcataatgcccttatattggcctaagtccttgatttccctagaagtataagattcataacgtttaatgcccttgggcttggaaccgtaaccaagtaacgcatattccgttacattaactaaaagaagaattcattattatattcattcaatttattatatttcctttattttcaaggacttagggactatacagacccttcaattcgtataaggggccaaaagcgggttaatgtaacgtttgtctaacgttatgcttgacaggctaacggcagtcgattagacttggcatacttgttaaccaaaggagttcgtaccatgcctattcaaatcgtcgaatcttcaccgaaggcgaaagaagtaatcgaaaccaagcgcgaacagcgcgcggaaatgtacccgtttgaacaattggaagtcggcaagtcgtttaccgtgccgcttgacgaatgcaattggaaatcgcttcgaattattacgtacaagagaaacgccaaatacaaaggcgaacgcgaatttgcttttataaagcatgacgacttgaagttggccgaagtggcgcggctgaaatgaacagcgacgcgcggcccaatgtgggcaagccggttcgcgtgttcgcgtcgtcgtatcttggccttcgcgcgcagtatccgaacgcctttgccatccgaccaacccggacgggctatcaagccgtcgtaatcatcgaagaaagggcgaagcatgtacgaaatcgaaaccggccataaagtgccgaagcaacgccgcaaggctggaagcgtgccgaaggccgttcaacaggcgtttaacgactacgccgacgcatataaggccgtttacggcgtgcgcccgctgtcgttcacgtatgaccgcgaaagcggctttattcgtgtcgaaagtagcggcggcgtaagcgtcgcaaggctgcgcgaaatgacgaaacaacttcgttaccgcaaaggctgaaaaaagttgttcgcaggtattgacgaagcgtcgaaggcgtcgtactatagacccataccaacgaacacaaggaaccgccgaaatgaaaaacgcagaaatcgcagcaatggaaaccaaaatgtcgaaggttgcaggcgcagccgttgaacttaccattcgcgccgaacgcgcttttacgttcagcttcgaaagcgtcaacgaagaagccgccgcaaagctggcaaagttcttcgaaggccaagctaaagtcgaagttgaacacgacgaagaatgcggttccttcgtttacgtcgattgcaagtaatcaacagcgcgccgggcgcaacccggcatttttgaaggagttataacaatgtgcatcgtatgcgatattaaacaggccgtcgaagtttccggcccgaacaaagaagaccgcgccaaaatccttggcttggtcgaaaagctggccgaagccttgggcgatgttctggaagtcgcgcaggaagtacacgaagccaaccccgaagcgttccagccggaacacgtcgcgcgcttgcagaacgccgccgacttgctgaacgaccgggacgaactgcccgacgccctgttggccctgctgttggccgcccttgggcgcggcgtcaaggtcgaaacaatccgcgtcgaactgcgcgaaggcgaaacgccagaacaggccgtagcgcgtgtaatggccgaacgcgaaggcggggccgcaacgaaacactaaccaaagcgccccggctgttgtatagtcggggcttctttctatcatggggaacgaaagaacatggcggacgaagtagaccaaacagccgaccgaatagaaaacgaactaagctttacggtcggcgaactatgccgaaaggccgcagcgatacccgcaggccgtccgggcgaatgtgatttttgcggcgaacacttcgcgcgcgttgtcgaagtaaccgacccgcgaacgggcgaagtcgtcgaaagctgcggtcgctgtcgtgaccgaaggggcatcgcatgacgcccgcaacccttgccaagtctggcaccgaacacgcgcaccaaacggcgctttttgcttatgctgccgtcgcatacttgcacggcttcgacgttgccgacgaatggtcgaagaccggcaaactaccgaagcgcgacccggacgcaccgccgaaggtgcccgcccttgaatggttccacgccataccgaacggcggcagtcgcggcgacgacgacaagtcccgcaagatacgcggcgcgcagttgaaggccgaaggcgtgcggcagggcgtagccgatacgttcttgccttggcctgtttacgaaccgtgccccgcagattcgcaaataatgatgatgaaatgggccggtctttatatcgaaatgaagaagccgaccgaacgtccgaagtcggaaaccgcaaagggcggcgtatcggacgaacaacgaagtttcggcgaatacgcaaagcgcgtcggctatggttgggccgtctgctatgattgggaacaagcggcgtcttaccttcgttcctatatcgaatggggttcgtaatggggctttcgtgccttgcctgcgaacttacccgcgcccggttgaaagcggcggcgctggcccttgtgggctggccccttgaccgcatcgccgggcatttgtccgtttgctatagcgaacggtattacgtcgaaggcggcaagctgtatcgcgcgcgaagttgccgccgtatcaaccgcacttgataaggggcgaaccatgaaaaagaccgacgaagaattgatagacgaagcccgcagcattgcgcgttcgaaacgctgtttcgtcgtaacgaagccgggttattggctgctgtaccgcgaatgcacgccgcgtaacgtatgcgtcggcaaacggtcgtcggcttcggcgttgctgcaacttgcgaaaaaggcttgacgcagcttcgaagctgtcgtacacttcttcgtaagttgaacgaacaaaggagtaacgaccatgcccgcatataccgtaacaaccgaattcgaaatgaccgacggtcgcgttctgtcgtgcgaatatggcgtatcgtatacgcccgcttacattagcggcccgcccgaagactgttacccggaagaaagcgacgcgggcgaaccgacgtactttatcgacggcgaagaagtcgattacaaagaccttccaaaaggcttggacgcaatcgccgacaagctttacgaagcggggccgggcgaatattcgtattcgcaatcggacgttgacaacgaaccggattacgaaccggattacgattactattaacgaaggagtaacgaaaatgtcttggattatcgtttgggcggccctgtccgtcggcgttgtccttggcttcatgctggcggccctgttccgggccaatggccccgacgccacgtccgcgaccgttacggccctgtcgcccgcgcaggcggcccgcatgggcgacgcgctgtaccacgcgggcgaaatgctgcaaagcggcgacttcgaatacgtgtcgggcgggttcatcgtgcaagacttggggcacggcgtcgtaaacttcaaaggcgacttgtcgttaagggcggtcgaagatgaataaggacgaagcgcgcgaaatattcgaagctgtcaaggccaaccgggcgaagattgacggttgcgcccgccatcgcttcgaaatcggcgacccgccgtacacgttcggacaaaagttcacttgttcgaactgcggcggcacaatggacgccgtacaggcgttccgatactgccaaggcttcaaggccgcaggcggcaacccgaacgaagttataccgggttacgaataatggaactttcgacccttgaagttgttttaattgtcgtaagtgtgacagaaaccgccgtttctgcgtatttttggcgaaagtggaaaaagaagcttgacgacgaacgaaagttatacgaagataagcgcaaggaatacgaacggcttatagaagccctaccgataggacgaagcttattatgaacattgacccgctttttatgacgattggacttgccgcacttgccgccgtttatttgaaggtcggccagattaagcgccgtcgcattatagaacgtcgcattaaacaagccatcgaacaagcgacggtaaatcgcgcacgcgctgaaacgcgcggcaagattattgcaggcgaacgcgaatggcgggccaagtgtcgataatctacgcaccgcgcgaagccttgtccaaatgggacgcgcgatttattgaactagccgaacacgtcgccgaatggtcgaaagggccgcgtaagcgcgtcggcgcggctatcgtgcgcccgaatcggtctattgcgtcgcttgggtacaacggcccgccgcgcggcttcgacgacgccgtttttctgaacatgacgcgcgacgaacaacacgcggtcgcaattcatgccgaagacaacgcaattcgacaggctgcgccgggcgaagacttgtccgcgtgtacgctgtacgtttcgccgctgtttccgtgcgccatttgtgccgaccgcatcgttcgggccggtatccgtcgcgttgtcgcttattgtgggcatatatcgccagactggcgcgcgtctgccgacgaagccgaacgcatctttaaccaagcgggcgtcgaatgcctgtttacaatggattaacgaacatgaaaccgctagaccattcgcaaatcgaaggcttgttgttctatcaagacccgactacgcaaaactatatcggcgcaccgaaggccgacccgttcaaccaagccggaagcttcgtcgcattcgggccgcgcgttaccgttgacccggcgttgtataacttgcttgccgcagcgccgacaatgtaccaagccctttcgatgcaatacgcttaccttcaagcgcaaatcgaagttatcgaacgcttgccaagggtcggcgaacttgataagctgttgtcgtcgttaatcgaagcgcagaacgccgcgctaatggcgcaacgtatcgcgcaagtcggttacgaatctgtcgcaaattcgcttgacaaaggttcgaagccgtcgtaagcttcaaccatcgaaacgaacaaaggtgcccacaatgaaacgtaatcttcttgttatcgctggaatcgtcgtcttcgtcgcgttgcttggtatggccgggcaaatggacttcgaagacgaagcccgcgcgcacctgttgtattgtgacaacgtagcgaacggcgtttggccggattacgacaaaatttacgattctgaatgcacgcccgaacgcatcgcagaaatcgaagaaattttgcgttgaccgcttgacacgacgaacggtcggcgtaaaatcaacccgtcgcaacaacgcgacataaccttaacgttaaggagttacataaaatggctaccaagaaatcgaccgcgaagaagaacaccgccgccccggttatcggccttgccgaaattgttgcagccgggccgaatggcctgtatacttcgcctgccgtacatggcccgcttatcgaagccggtatggtagaaatcaacccggcagtaaccaacgaagcgggcgaaattgcaacccgcgcaacccaaaaaggaatcgacgaaatgaatcagaacaccgaaaccggcaccgccgcagcttccgccccggtcgctacttccttcgccatcgaagacaacgtacccatgccgaccggcagcggtcgcggtcgcggcggcaacgtttacccgttcgacgcgctggaagtcggccaaagcttcttcgttccgaacagcgaagacaagccgaacgccgcgaagtcgcttgcttcgaccgtttccagcgcaaccgcccgtttcgccgtgccttccgaagacggcgcgaccaagaccaacaagaagggcgaaaccgtgcccgtcatggtcgaaacccgcaagttcgttgttcgttcggtcgaaggcggcgcgcgcgtctggcgcaccaagtaagcaacggcgcgggctacggcccgccctacgcctacgcttcaacggaaaccccggccattgtgtcggggttttcttttgcgtttcttgtcaatttgtgctaatccgtgttaatcttcggccaaatgcacttttcagggccggggcaaatgggcgacgaaataaaatggttaattggcgcgtttattggattgtttaccgcagtcggcgggcttattgttcgcgaccgtcaagtaatgaaagcaattaacgacggcgacgaaaaattacacgaccgtattaacaacgttcaggccaattatgttcggcgcgatgatttgaacggacatattcaaagcatcgaaaacaacgttcgcagtatgcgcgaagaacagcgcgaaacaaaccgtcgaattgacgcagttttgggcgcgcttgccaagaaggaataatgcaaatgaagaagcccgaacttatcgaaaattggcgcgaatgctggctcttttggtcggttcgactggccgcagtcggcaccgcgattaccggccttcttatagcgtttcccgacgcagcgttggccgcatgggcgctaatgccgcacgaattcaagtcgtcgattccgccgcagtatatgccgcttatcggcgttgttgtctttgccctttccatcgttgcccgccttgtcaagcaaaagaagttgcacaaggggccgaccgatgaataacgaacttccttgggttgccgaagcccgaaagtatatcggccttcgcgaagacacttcgaagacttcgcataacccgaagcttcttgccatgcttgaccgcatgggcgaattttccaacgaatcccgcgcttggtggcacgacgacgaaacgccttggtgcggactgttcgtcggctattgcttgggcgttgccgggcgctacgtcgtccgcgaatggtacagggcgcgggcatgggaagccccgcagcttacgaagcttgaccggcccgcatacggggcgcttgtgaccttcacgcgcgacggcggcggccacgtcggttttattgtgggcaaggatgcgcgcggaaatcttatggttcttggcggtaatcagtcgaacgccgtaagtatcgcaccgttcgcagtatcccgcgtaaccggctatttctggccgtcgttctggcgaaacaaagccgcagttaaaagcgttccgttcgaagaccgctattcgctgccgctgttgaagtcgaacggcgaactttcgacgaatgaagcgtaaaggggcatcgtatgttttccgtaatttgggccaagtttggcaaatggcttgccgcaatcggcgcgggtcttgtcatgctggcaagtattttttatgccggtcgcaagtccggcgcaaccaaggccgaagccaacgcagcaaacgaacgggcaaacgaccgcgaagcaatcgcagttcgccaagttaacgaagcccgcgaagcttccgaacaacaggtaaaggcggtacaaaatgcgaaagacgttgcttccgataattctacttttgacgacgacgaagttactaagcggctgcgcgacgaatggtcgcgcgactgaaccgcaaagcatcgccgacgcagtacaaacgaaacccgttgtaatcgacacggcttgtaaatgggttgcgcctatttggatttcgaaggccgacggctttaccgctggcacggcccggcaaattctgaaccataacgaagccgtcgaacgcaattgcgggccgcagtcgccgcctaaatctgcggacaagccttaacagaacgcggggcttgcggtatagtgaagccaacgacgtataaaataggccgacactatgtccgacgaaccgaaagaaagcgaagaaaaggccgcatacgcggcccttcttttgaaagaacgcgacccgtttaaggctgcgctttcgctgtttccgaacaacacgaatcgcgcgctatggattgcgaaccattggccgaacgacgccgaagttaaggccgaacaaaagcgccttaccgacgaaggcggcgatatggcatttcttccgggcaaaagcgaccttgcccgcgacatttggcagcgtatgcaaggtacgacgcttccgaacggcgtaaccattccgccgacgcccgaagaatacgcgaagcttgccaagctttacgccgacgttcgcgggttcatcgaaaagccgcaaacgaacgttaacgtaacgacgaacgtaaaccgcgtcgtcgaaatgcccgtatttgctaacgaaagcgaatgggaagcggaagccgcacggcaacagcgcgaattgttagaaaatgcacgcactcgccattgatacaaacggggcgaaacctgttccgtatgaagtcgtatttaagccccttccggggtcgcagactatcgccctttgttcgatggcagcgcatacgctgtacgaaggcgcacgcggccccggcaagacgcttacgcagcttatgcgcttttatcgtaacgtcggcaaaggttacggcaagttctggcgcggcgttatcttcgatttggaatttgaccatttgggcggccttgttgccgaatcgaaaaaatggttcggcgataacggaaagctgaaagacggcggcaagttttacgaatcaacgtcggcttataaatgggtttggccgaccggcgaagaactgttgtttcggcacgttaagaagctgtcggattacgaaggcttccacggtcacgaatacccgtttatcggctggaacgaacttacgaagcatccaagcggcgacctttacgacaaatttatgtcggtcaaccgctgtacgttcgacccgataaaagacacgccgaaagacccgaaaaccgggcgctatttgacgccgaacggcgaaccgctgccgcctgtaaagtgcgaagtattcagcacaacgaacccaagcggccccggtcacaattgggtaaaacgtcgctttatcacgattgccccgcgcggcaccgtagttcgtcgcgaaattcagatttacaacccggcgaccgaaaaagaagaaacgcacgtaattagccaaatcgctatcttcggttcgtataaggaaaacccataccttccggcgtcgtatatcgccgaactggaaagtatcaaagaaccgaacttgcggaaggcttggctttacggcgattgggacgttaccgcaggcggcgcaatcgacgacctttggcaatcgcatatacacgttgtaccgcgcttcgtcattccgccaagctggcgaatcgacagaacatacgacgacgggtcttcgcatccgtttagtgtgggctggtgggcggaagcggacggcaccgaagcgactatagttctttcggatggcaccgaatttacgttttgcccgcaacccggttcgcttattcagttgttcgaatggtacggatgcgcgaaagacgaaaagggcgaatatgtaccgaataaaggtttgaagctttcggcgtcgaatatcgcacaaggcataatcgaccgcgaaatttcgctaatggcgaacggctggattttgtcgcagccttggcccggccctgccgacaaccgcattcgccaagtaatcgacagcgaactagacacgaccgaaaagcttatgtcgaagaagggcgttcgctggactgaatcggacaaatcgccgggttcgcgcgtaatcgggttgcagcttttccgcgaccgattagaagcgtctgttaatcgcgaagggccgggtatatactttatgtcgaattgcgttgcaagtattgatttgctgcccacactgccgcgcgacgaaaagaagattgacgacgtagacacgaacgccgaagaccattgttacgatatggtgcgttatcgcgtattgaaaggcgcgaacaaagcggcagcgaaattcaaacttgttatgccaacttaaaggaacccaaatcatgccgaacgtttcatttattcgccccgaacttggtaagctgctgccgctgtattacctgattcgcgacgcaatcgcgggcgaaccaacggtaaaaggcgcgcggacgacttatcttccgatgccgaacgccgaagaccaatcgaaagaaaataaggcgcgttacgaagcttacttgaagcgggccgttttctataacgtagcccgtcgaaccctgttcggcttggtcggtcaagtgttcatgcgcgacccggttgtaaaggtgcccgcgctgttgaacccgcttgtcgcgaacgcgacgggttcgggtatcaaccttacgcagcttgcaaagcgcgccgtatcgctgaaccttgcatattcccgcgccgggctgttggtcgattacccgacaaccgaagccgaaggcggcgcgtcgattgccgaccttgaagccgggcgcattcgtccgaccctgtacgtatattcgccgactgaaattatcaattggcgaacgaccgaccggggcgcggaagaagttttatcgttggtcgtactgttcgaaacttggtgcgctgccgacgatggttttgaaatgaaaacgtcgggccaattccgcgttttgcgtttggacgaagaaggttattacgtccatgaaatttggcgcgaaccgcagccgaccaaagccgacgggtcgaagattccgaagggcaattatcaacaacacgtcgtttacaagccgacggatgcaagcggcaatcgtcttaccgaaattccgtttatgttcatcggttcggaaaacaacgattcgaacccggacaacccgaacttttacgaccttgcgtcgctgaatatggcgcattatcgcaattcggcggattacgaagaaagttgttatatcgtcggacagccgacgccggttcttatcgggcttaccgaagaatgggttacgaacgttcttaaaggttccgttaacttcggttcgcgcggcggtattccgcttcctgccggggccgatgcaaagttgttgcaggccgacccgaacaccatgcttaaagaagcaatggacgccaaagaacgtcaaatggtcgcacttggcgcaaagcttgtcgaacaaaaggaagtacagcgcacggcaaccgaagccgaattggaagccgcttcggaaggttcgacgctttcgaccgcaaccaagaacgtttcggcggcctttgaatgggcgttgaaatgggcggcccgttgggtcggtcaagccgacggcggcgttaagttcgaactgaatacagatttcgacattgcccgcatgacgccagacgaacgccgttcgcttgttgaagaatggcagaaaggcgcaattaccttcgaagaaatgcgaaccggcttgcgtaaagctggcgtcgcaaccgaagacgacgccaaggcgaaagaaaaaatcgccaaggataccgccgaagcaatggcccttgcgaccccggccaacgtgccgggcgatggcagcggcggcgataatgtgggcaacagtgaataaggggcgcaatcatggcactatcggacaataagcgactgtacgatattgcgacgcgccttgctgtttacgttgaagacgtgaaagtttggcagtcccgacaattcgggttcgtacttcgcgaagtaaacttggaactaacgcgccttcttggccgtgttcgttataagacccttgacggtctttcgaaagcgcagttaaacaagcttgtttcggaattacgggaatcgcaatcgaagatttacagcgcatacacgcaaacactacttgaacagttaaaggaattcatgcgggccgacttggaagtaaaccggcgcgcatgggttacgggttatatcgaacttgacggcgaagaaagcgacggtattatttcggacgaagaagcgatacagtttcttttagaagtacccaacgccgattcgaaccctttgttcggtttggccgctgttacaggaagcgacgaacgcatttggtcgcaagttacgaatacgccaattccggcaaatggtttgtacttgctgccgtttatcaagacgtttacgaattcggcacaagctggcgtcgaaagcatgattcgcaaagcttgggcgaaccgttggacggttgaagaaaccttaacggcgcttgtcggcgatggaaccgcagcgcagggcacgccgtcgcagttgcaccgggtcaacgcgcaagccgcgtcggtaatccatacggcaaccgcgcacgttgcggcggtcgttgcggctggcgttatgtctgcggtattcggtcgttacgtttggtattcggtaatcgacggaaagacaacggacatttgcataagtcgaaaccggcgaatctatcgcttcggcgaagggccgttgccgcccgcgcatatccgttgccggtcgcacgttgccccggcaaataccgctagtgacttggccgaagaaacgttttatacttgggttgcccgtcaacctgcccaagtgcaagacgacatattaggcgacgacggcggcgaagctttgcgcgatggtcgcttaaaggcgaaggatattccgaagtatgatgcggacaggccgctaacttacgaagaattccgacgcaagattaaagaaattctttcccgctgattcggtgaatcggcataaccgcaaggagtccttgaaatggcactgaaaaagaaacttaccaaagaagaacacgcgaagctttcggacgcactgaaagccgaatatatcgaagacggcgacggcttccgccttgacgttgacggcgacgaagatacgggcgctttgaagcgcgccaaagaccgcgaagcgcagttgcgcaaagacgccgaaaaggaagcaaaggaacttcgcgaacggctggaatccatcgaaggcgacgacgcgcgcaagaaaggcgacattgcgacgcttgaaaagtcttggcaatcgaagcttgaaaaacagcgcgaagaatacgaagccaaggtttccaagcttacttcgcatacgacgaaaacgcttgtcgataacgtcgcttcgcagcttgcccacaagatttcgaacgccccggcaatcatcatgccgcatatcaagtcgcggcttatcgcagacttcgaaggcgacacgccggttacgcgcgttctggacaaggacggcaagccgtcggcccttactatcgacgaactggcaaacgaattcgttgcaaacaaggatttttctgctattatcacggctagtaaggcgtccggcggtgccggtaagccttcgcagaacggcggcggtgccccgaaatttaacggtcaatccgacaaacccgccgacctttcgaagatgaatcccgcagaacttgcggcgcatcttaaagaagcgaaggcaaacgaaactaaggacgcttaatcatggcactttccgaccttgctgtttattccgaatacgcttattcggctttctcagaaaccctgcgccaacaggttgatttgttcaacactgcgacgggcggggctatcatgctgcaatccgcagcgcaccaaggcgacttttccgacgttgcctttttcgccaaggtaacgggcggccttgttcgccgtcgtaacgcctacggttccggcaccgtcgccgaaaaggtcttgaaacaccttgtcgatacgtcggttaaggtcgcagccggtacgccgcccgttcgccttgaccccggccaattccgttggattcagcagaacccggaagtcgcaggcgcggcaatggggcagcaactcgccgtcgatacgatggcggatatgctgaacgtcggtcttggttcggtctattcggcactgtcgcaggtttccgacgttgtgtacgacgcgaccgcgaacagcgatgccgccgacaagctgccgacttggaacaaccttaacaacggccaagccaagttcggcgaccaatcgtcgcagattgccgcatggattatgcacagtacgcccatgcacaagctgtacggttcgaacttgaccaacggcgaacgtctgtttacttacggcaccgtgaacgttgttcgcgacccgttcggcaagcttcttgttatgaccgattcgccgaacctgtttgccgcaggtacgccgaacgtttatcacattcttggccttgtgccgggcggcgtgctgattggtcaaaacaacgacttcgacgcaaacgaagaaaccaagaacggcgacgaaaacattattcggacttaccaagccgaatggtcgtacaacatcggcgttaagggcttcgcttgggacaaggcaaacggcggcaagtcgccgaccgatgcggcgttgttcacttcgaccaattgggacaagtacgcaacttcgcacaaagaccttgcgggcgttgtcgtcaagaccaactaacggacggcagacggacggggcttcggccccgttcttctagtccttcacaaattcaaaggagtttcgaagatgaaaccggcaaaaattctgttcttcgttgacggcaacgcgccgaccccggaagacttcgcagccgccgccgaactgaacgcgcaagttatgttcaggaacgcccgcgctgttccgtccgaaccgcattcgctggaaatctgcgacggcgtagcgggcaaggttccgaagctgtacgccgacgcttacccggaagcgggcgaagcaatcaagaagaaggccgccgaactgaaagcccttacttcgaaggtcggcgacgccccggcaccgaaggccagcggcaaggccgccgacaagcccgcagccgctacgcagggccagaccccggcgcagggccagaaagccccggcagcggccccgcagggcggcagcgccccggcttggaaccccaacccggcgcagtaacaaacggacggcctgtcgcttattgtgggcaggccgtttaatcaacgaattaaggagtcttcgcaatggcaacgaaaaaagttgtttattttacggcaggtattaacgcaacttcgggcgaactggccgacattgcgaagcttaacgccgcagccgttccgcaatacgaagttttggtagccaacggcgcagcaaatgccgaatacggcgaaaccgaccgcattattccggctgatttcatcgcgggcacgattcccgacgtttaccgcgtagacggcgacccggaaaaagacccgctttatcccgaaatcgaccccgacgcaatcccgaatcaggcgcttacggcaacgcaagcaattgtttccgacgaagacgttttggaactgttgggcgaagacgtaaccgcgtcggttgccgacaatgttttgtcgctgtccgtcgccggtacgttggttttcgtcaaggatggcgacacgctggccgtaacgactggcggcgaccctgcgggcgttgttaccttttccgtaaccgacggcgttttgtccggcacgtttgcggctgattaaggggcgacggcatggcaattgcaatcgttgttgaagacggaagcggcgtaacaaacgcgaacagttacgtaagcgtcgcagacgcgcgcatttacgcttcgaatcgcggcgtcgaacttccgttggacgacgacgaattggccgccatgctgattcgttcgacggattacctagaagcgcaggcgtgccgctatcaaggccgccgcacttcttcggcgcaggctttggaatggccgcgaactggcgtctttttgaactgcgacgaagtgccgtcgaacgttattccgaaatcgctaatcggcgcgcaagttcaacttgcgattgcaattaacgacggtttcgaccttcaaccgaatatttcgccgcaagactacgttattcgcgaaaaggtcggcccgattgataccgaatacgcagacccgaccgccgttggcatcatgcccacatttacagcggttaacgcgcttcttgcgccgctgtttggcgaatgtgcggcgaacaagtttgcgcttcgaacgataagggtttgacaaatggcacaattcgaccgcgcaattaagacggcccaacggcttatcgcgaagaacggcgaaaaggttaaatggcgcgtaattccagacgcagcgccgaccgacccgaacaagccttgggaacccggcccggctttgcccgaagacaaagacgttaccatttgctttttgccagttgaccggcagacgcaagaaaccttcaacttcattaaaggcaccgaagttccgaagggttccgtaatggggcttatgggtaatgttccgtttgaaccgaatttgaaagacgttgttattcgcgatggcgtcgaacttcgcttggcatatatcgacgtactttcgcccaacgggcaaaaggtactttatacgatggtatttcaagcatgattgaattcgaccaagttaacgacgaaataaacgcgcttttccgcgtagcttggaacgcaaaaagcgcggcaattgcgggctatgttcccgaaattcgttggcagggcgtgcaatatcgcgacttgccggacggttcgaaattttgggttcgactgtcgaagcaaaccgtttttgaagaacaagcgaccctttcaacctgcgaaggagtaccggggcaacgaaaatacacggcgtcgggtcttgtcttcgtacaaatcttttgcccgaaatcgaatacgcaagcgttcgaacttgggcagaaattggcgaagcttgcccgcaatgcttttcgcgggaaatcgacgccgggtaaggtttggtttcgcaatacgcgaattaacgaacttccgcccgaagaactttacgaacggtttaacgtcgttaccgaatttgaatacgacgaaataggttaaggagttcttaacatggtatgcgaaattgccaaaatcgacagcaacattaccggacttgccttcgccgaagaagaatgcttgaagcaacttccgacgacgcccgtttggtacggactggaacccaacagctattcggacttcggcggcgaactttcgaccgttgcccgcgcccctattgacccgtcgcgccagaacaagaaaggcacgattacagaccttgacgcttcgggcggcttcaacacggactttacgaagtcgaaccttacgcgccttttgcaaggcttcttctttgccgatgcgcgcgaacttccttcgacgcaggcgcttaacgccgccgctgtaccgcttaccggcgttaccgcagccgacgacacttacgccgcagcttccgggcttggcgtgttcggtgccgatatgctgctatatgcgaccggcttcgcaaacgcagcgaacaacggccttaaaaccgtcgtttcggctactgcaaccggcgtcgttgtttccgaagctttggccgacgaaacgccgtccgcaggcgcgaagctggaatgcgtcggtcgccagcttgcaagcgcagacgcgaacattgccgtaactggcaacgttgtttcgcttatcgttaccgctggcgactttacgaccatgcccgaactgttccccggtcgttgggtcttcattggcggcgatgccacggcaaaccgcttcgccaataatgtgggctttgcccgcattaagtcggttgcagcgaaggcgcttgttttcgacgacgtaacttggcaggcggccaacgaaaccggaaccggcaagtcgattcgcatttttaccggaaccgttatcaagaacgaaaaaacgccgtcgcttatcaagcgccgttcgtacaacatcgaacgcactttgggcgaaggcgaaaacggtacgcagtgcgaatatttggaaggcgcagtagcgaacgaatttacgttgaacgttccgcaggccgacaagctgaacgccgacctttcgtttgttgcttgcgacaacacttaccgcagcggcgaccccggcgacgaacagaaaaccggaacccggttgtctgcgcccggcgaagatgcgtttaacacttcttcggacatttaccgaattaagatggcagttcacgacgccgcgtcgtcgaatcctgccgccctgttcggctacgtttccgaagcgaacgtttcgattaacaacaacgttacgccgaacaaggcggtcggcgtgttgggttctttcgacacttcggcgggtaacttcgaagtcggcggttcgattaccgcttactttacgaccgtcgcagcggttaaggctgttcgcgcgaacgccgacgttggtttgtcggtaatcagtgcggccaagaacgccggtttcgtgttcgatattccgttgcttggtttgggcggcggtcgtctgaacgtcgaaaaagacgcgccgattaccgttccgctggaacccgcaggcgcagaaaacgcgaacggctatacgatgctgtacgaagtgttttcttatctgccgaatctggcaatgccggactaattgcggtaaactcaaagggccgggtaataccggccctttcttcattcaatcggagtaaatcaaatgtctggactgtttaagcaattcaaaacgaattcggcaaaagaagtcgaaggcgtcgaaatcgaatttcccgaagcgcagaacgacgacggcaccgttcccacgttcatcatttcccgcatgggcaaatcgaacaaggcgtattcaaaggcgcttgacgcggcgacccgtccttatcgccgtcaagtcgaacttggcacgctgaaaaacgaagtcgccgaatcgctgtttatgggcgtgttcgtcgataccgtgttgcgcggctggaagaacgttcagggcgaagacggcaaggaaattgcgtattcgaaggacgccgcaatttcgcttcttaccgaactgccggacgtttacgaacgtttgcaggaagaagccaagttggcttcgaacttccgcgataacgctttggaagccgaagcaaaaaactaaccgaagttttggcgcacctgttggaacttggcccgcacgaacaggcgatagcaaagcaagcgatgcgcgcggggcaaccgttacccgaacgcatcgcgaacgcgccagaacttgaagtaggcttgcagttgtatttgcaagccttcttcgacctagatagcgaacggtcgcacggcaacggtttaacgccgataccttggacaagtatggcggcttacgcaagggctttcgagtttgacgaagaacaaaccgaagacttgttttactttatgcgaaagcttgattcggaacacttgaagaaactagcggacaaacagaaagcggcggcatcgaatggcaaaaagcctgctagacctagccgataggctggaaaagaaagcgaaggcaatagacgaagcggcgtcccaaaacgccgtcgataccgctttggctattgtgggcgacttggcttacaaaacgcccgtagatacttcgcaagctttgtcgaactggattgtaacgctagaaagtccgtcgggtcaacaaatcaagccgcattttccgggttcgcagggttcaacgcaacgcgcttcggcggctgaaacgttgaattctgcgaagcttgttttacgaaacaagaagcccggccaagcgatatttattacgaacaaccttccgtatatccgcaggctgaacgacggttattcggcacaagccccggcggggttcgtcgaacgcgccgttttgattggtcgcaaaatgcgtaagaagttcaagattaaggattaaaagaaatggccgacgaaaacatagaaattaaggttcgagataaagtttcgccgtccatttcgacgaagcttcgcacaattgcaagcgaagcccgcaacgccgacgccgcagttaagaaccttcaaacgcagctttcggcaatcaacgtcggcggcttgtcgcagcttatcaacgcatcggccagcgcaacgcgccagcttcaacaaggcgcgcttgccgcgcaacggctggcaaccgaacagcagcgcaccgcaacagccgcagcgcaggccgccgcagcccaaacgcgcgtcgccacggctgcgacccaaggggccacggcgcaagccaaccttgccacggccacgcagcgcacgcagacggcccaacagcagacggcgacagccgcgcagcgcctagcgacagaacagcagcggacagccgttcagacggccaacgcggcggcagcgaacgaccgggccgcccttgccgccctgcggctgcaacaggcgcaagaccgggccgccaattcgacccgcaacgcgacttcggcccttggcggatacattcgaaccgctgccggaattcttggcgtaacgatttcggcgaacgcaattcttgcaagcgccgacgcatacgttacgcttcaaaacaagttgcagaacgtaacgaagtcgcaagaacaagttaacacgcttacgaacgaacttttcgaactgtcgaaccgcacgcgcgcgggtattgaagaaacggcgacagcgtttacacgcttcgaccgcgctttggcgtttatgggcaagtcgcaagaagattcgttgcgaatgaccgaaaccattaacaaggctttgattgtttcgggcgcaacagcgcaagaagcgtcgtcggctttgttgcagctttcgcagggctttaacgccggtaagttgcagggcgacgaattccgcgccgtttcggaaaatatgccaatcgttttggacgccgtagcgaaggcgcttaacgttccgattaaccgcgttaaagaactttcgaccgaaggtaagattacttccgaagttctgtttgaagctttcaagcttatacaagaccaagtagacgcaacgtttaacaagacgacgcccacaatcggccaaagcttgacggttcttcgcaacaacgcaattcagttcttcggcgaattgaacaaagcgaccggatttactgccgggctttcgcgcgcgattatttggcttggcgaaaacttgaagacggttgccgtaattgtcgccgggcttggcgtcgcgttgcttgttgccttcggtgccccgttggttggtgcgctggccggtgcgacggctgcggtaaaagcctttacgctggcgcttgcttcgaacccgattggccttatcgtcgtcgcgctttcggctgcgattgcgtaccttgcgcttttccgcgacgaaattaacttaggaatcgacgacgttacgacgttgggcgatttcttccgcgcgacctttgaaggcatcggccaagcaatcgacgacgttaaaaccatcgcgtcgcaattgtgggcagaactgcgcgacttcgcaagcgccgcgcttggcgaaattacttcgaacgttgacgattcgacttcttcttggtcggacagctacgccgaattcttccaaaccaaccgtacaggttgggccggtgcattggaaaacgccgcaaaagttcttgacgcaatcgccgggcttttgaccggggccgcaacgttcgcaggccgtgcaatggccgaagttgttatttcggttcaaaacggaatcgcaaacgcttacaacgttgtcgcgggttggattgaaaacgtaacgaataaagccattgaagccgcgaacaagcttcgcgcgatggtcggtaagtcggcttacgaacttgtccaatttgaacgcatgggcagcgcaggccaaaccgaattcgaatcttggggcaagctttgggcgcaatcgctggaagacggatttaacagccaaggcggcgcaatgcaaaacctgttgaacggccttttcgaccgttcgcagcaaatcggctcgcaacgccgggccgcaggaagcgcgcagcttcgcgggtctggcgcgtcgcagcttgccggggctaccgacgcgaacgcggcgaaggctgcggaacgtcgcgcgctggcaatggaaaaaatcaatacgcagcttgataacgaattggcgcgtatgttccaacttcaaccgcagcgcgaagcgcaagcgaagtttgaccaaatcgaagaaagcttgattcagaaaaagattaagcttacgtcggaagaagccgaagcaatcaaggcgaagattaaggccgttcaagacgcgaccgaagttcaacgccagttcgacgcaatttacgccgaagctgttaacccgttgaaggaatataacgcttcgcaggaagcggcgaacaagcttcttcaaatgggcgcaattacgcaggaacagcacgcccgcgcagtaacaaaggcgtcggaagcttacgcgaattcgcaagacccgttgcggcagtataaccgcgaccttgaacagcaattgcagcttttgcaaatgctgccgaagcaacgcgaaatcgaacagcagattatgcaagttcagaacgatttgcttgcaaagggcatcgttctaaacgaaaccgaattggcgcagcttcgcgaaaagcttttgcttattcagcaagtaaacgccgtttcgcagcaagaagcgtcgttgttggacgccagcgtaaacaagcgccaacagtttatcgaccaacttaaagcaattcagaacttgcgtaacaacagcggaagcggtttcaacgcaggcgaccaagccgaagcaaccaacagcatgttgcaaggcatgggcattgatacgacgaactttcaaacgcagcttaacgcgcaattggcgcaatatcaaacttacgtcgaacagcttaaaatgcttaacgaacagcgtttgattagcgaccaagaatacgccgccgcaagtatgcaacttgaattgcagcggcaaaacctgtacttgaattcggcaagtagtttcttcggaaacttggccgcgcttcaacagtcgggaaataagaaaatggcggcggtcggaaaggccgcagcaatcgcgcaagcgatgattaatacgtatcaatcggcaacgtcggcttattccgcgatggcgtcgattccttacgtcggcccggcgttgggcgcggctgcggctgcggctgcaatcgccgcaggcttggcaaacgttcagcaaatccggtcgcagaataccggctttcaaatgggcggttataccgggtcaatgggcgtaagcgaagtcgcgggcgtcgtacacggccaagaattcgttatgaacgcatcggcaaccaaccgcattggcgttgccgaccttcaagccctgcaaacgggcgcggccagtgttcagcgcaacgacgaacaggcgatggcggctagtgtgggcaggggcggcaattccgaacccgcgcccgcgccggttgtcaatgtaccttttagcgccgttgtcgtacaatcaaaagaagcggccttggccgggcttaaatcttcggaaggccgggctttcattctggaaaccatcgaacaaaacggcggcaccgtcgcaaaaatcgtcggagttaaataaatgggttatcaaatcgcaacattggaaaagaacggcggcgacgattgccattatcaatttttggcagcaattaagacgtttgccgaatcgaacggatggacaacgcttcgttacaatactgtttcagcgaatcgcgaatggataggtaaaagcttgggtttatccggcgaagaagaaatttttataggttttcggacttatcaaaacgttacgtcggattattacaacatccttgccgcagtatttaccggatatgcgcccgaaaacagctttgatacccaaccgggaataattacgtcgggcattcctgcccacaataacgcaatcaagtattacatggtcgcaaacccgcagcgaatcgccttcgtactgaaagtcggaacgcccgtatttacgcacggttacgctggcaaaatgtttcagtacgccagacccggcgaatttcgttcgcctttggtttgctgcggaatgcttatcggcgcagccgctacgcgatacagcgatacggctatggttatgggctacaaaggaagccgaaacaacttccgtcttcgcgacaatatgggcgcttggcttgcgccttccgtgtttccttggaacacgtcatatttaacgggcggttctgccaacattcaaccgaccggcgataattactttccgcttcatttggaattaatgtcgtccggtaatatattcggcaggttggacggcatttatcatattagcggcttcaacaatgccgttgaaaacgttttgcaaatcggcggttcttcgattgttgaccaaagcgggttaacgcccgaagcggcggtttctgcaattttggcggtcggcggtcgcgcgtttgtcgttgcacaagacgcataccgaaccggcttcaatgattatatttgcatggaaatggcttaactatggcttattatactggcggggcgaattcgtttgccgatttggttacggccattaaaaacgccgttgctttgaatggttggacagtaaccggcaatattttggaaaaaggaacttcgtttatcgaaattctttccagtgcgtcggaacttactttgcgcggcggaactgcgcgcagcggttcaaccttggcgggcgaattgcagccttggcgtgttcgtatgtgttcgccgttcggcggcgttactgtaaactttccggtttcttacgaaatctttttgcataccgaccccgacgaagtttattgcgtaataaactataattcggcctattatcaattctgcgcttttggtaaatccgacgtacccggcttgccgggtacaggttgctttgttgcggcttccagctaccaaggcgcaacaagttttacaataagcccgacaactggcggcgcttcgcaagcttcgcaaggttcggcgggcatgttttggcacggcggttactcgattgctaacaccggcaacagttcgattcaccacggctatgcaacaggcggcggccagtctacaggttggtcggcttccgaccataccgacgcttggaaaacaacatttatcgaagctggcggcgtcaaggtaagcaaccaaccgaacacatttaataacggaacgcttcttattgactataaggtttggcgaacaagtccgtctagcggtcgaattcttgtcgcagacttcgcgcatattcgcgcaatgcgaattgattattacaaccccggcgaaaccattacgcttggttccgacgtttggaaagtttttccttggtttatcaaaaattcggacgttcgcaacggcggcacaaatgtaagcggaacccttgggtttgctgttaggatggtcggataatggccgggcgaattggtgcaactgttcgccttcttgattttggcgacgataacccggatattagttcggaacttaacgaacttacgccggaaatttacacttggtcggcttacgattcgccgcgcggtctttatgcaagcggcgttgaaaagcttatttcaaccgcaattcaaaacggcggaattgtgggcaggcttgggcgtgcgtttttcgacgattattattttagaattcacgccgcgccgcttaaaatcgaccttcaaaccatcgcgtcttcgcaaacccgcgaaattaacgtttggaacgcatacccgttcaacgctgccaaccttgacgacattttggtaagtcaaccgatgggaattactgtcgtcggccaagcggtgccgtatcaaatgccgccgcttaaagaacttacttacgaagtaattataggcgtttcggggccgcctaacattaacgccgaaattcaatttgatttcgcaaacgtggcgaatccgccgttcgttttaattgtcggaacgcgcgccgttaagttcgaccttgtgccggaagttccggtaaacgaaacttgggaatggttaagcgacaatattgtagcaatcgacggaagcgaacagcgcatagcacttcgcggcgaagttccgcgtattgaaattcagtcgaaagttatttttgattctgtcgaagctatccggcgtttttatgccgaccttatggccgctgtcggtcgcctttggattcctgaatttcagtacgcgacgcgaaccaacggcgcaagcttggcgggcggcttttccgtattcttcgacaattcgaagacggacgttcgcgcgggcgaatatatcttaattcaaacgccgcttaatactgcgcttgtcgaagtcgatacaatcgaaacgttcggggccaatcttacgtcggcgctaacgtttgatattccgcaatcgtcgcttgttattccgggttcgcctgcgcttatttcggataataccgcaattgcaagatacccgacgaacgacgccgccgaactgcaattgaattcgaagcttattcgccagcgttcgcagcttgcgcgccccggtgcaactgtcgtacttgaacagtttaacggcgttccaatcttgactaagcgtccgcttgccgacgaccttgttagggacgaagtttcaaccggccaaatttcgctagataacaacgtaggcgcgcaagatattatttcgcgttgggactatagccgcatcggcgggccgcgaagcttcaaagttaaccgcatttcaaatgccgaagaaatggattattggaaggcgattctttcgtatgcacgcgggcaggcgcgtaagttttggatgcccacatatcgaaccgatttggtgttggctgccacgccttccgacgcagcgtcaagctatacaatcgaaggcacgcagtacgccgaaaagatttggccgattatcacgcatcgctatttagaaattgaaacgtccggcggaattcatagaaccgttttgcaagatgcttcggagtatgaaggaaattcggtaattgcatttagtccgccgcttccgaccggggccgcttggatggaagttaaacgaatttcgtatttgttgcctgtacgccttgcagacgataaagtagaatggaagcattacgggttagaatcaatccttaatctttcgattagaacggcggaaccttaaatgtctgattacgacgacaaagaagaaagcgtaggcgatagcgccccgttcgaactttacgaattcgtcggcacttaccgtaattattacatgactacggacgcgctgccgcatgttttcaatagccaaacgtttaacccggttgcgggtttgaagcgcagtacgctaaaagttggaacgcacgaagacgataacgtagatatgacgattcaaattccgattatcgaacaaatcgttaaagactatgcgtttcaaactacgccgccttcgttggtgttgacaatttatcgcttgcagcgcgacgccgcaacttacgtcgcatactggaaagggccgattgcttcaatttcggttgacgatgaatttgcaacgttcagaacgccaagcaagttcggttcgcttttgtccggcaatattccgaatgtttacgtacagccgccttgcaataacgttttgttcgacgaacgttgcaaagtaagcagaaccgcaaattcgctagacacgcaagtttcggcggtcgaagggcgcgttatttccattccttcgcttggcggctttcccgacggttggtttgttggcggcgaagttgccatacctgctagaaacgaacgccgaatgattgtggcgcagtccggcaaccttcttacggtaaattatgaattcgggcgtatttctgtcgggacttcggttcaggttacggcaggttgcgaccattcttacaacggggccaacggttgccccaagttcaacaatcaaccgaacttcggcggttgcccgtttgttccgggcgaatcgaataacctatttcaaagcggggttcattaacaaatgtggattgcaattgtcttcgtcgtcgccttcttgcttatggcggcgcttatgccgaaaccgaacgtcgaaaacgcacgcgcggcgaaacttggcgacttccaatttccgcgttctaagtacggcgacccaatgccgctagtgtggggaacagtgcgccagaaatcgccgataacggcttggtttggcgacttccgcccggtgccaattcgtaagaaaatgaagaccgggctttttagttcgaagaaagttacggtcggttataaaaattatcttggcattgattgcattttgtgccttggccccggcgttcgacttcgtaagttttgggccggtacttaccttgtttgggaaggcaacttaacttcgtccggcgatatttacattaacaagccgaacttgtttggcggcgaagacgaacgcggcggcctgcaaggtacgatttcgttttacgacggtcgttttgacccgccgcaagattcttacttggtttcgaagattggcccgaatgttccggcttacaacggctttgcgcgtgcgttgttcaaagccttttatattggaacaggtacgacgccggaaccgttcagcttcgaaattcagcgcattacgtccggcttgcacgcgacttattcaattatgccaaacgggttggacgttaacccgatggaaattgtttacgacgcaatgacgcaaaaatggggccgcttcggcaaccttgaaagcgaaattgatatgccttcgtttacggcctgcgcgcaaacgctgtataacgaaggcttgggtatgtcgcttattgttcaatctgcgattaccggaaaagacttgttggaagaagtaatgcgcgtcgccgacggcgtgttgtatcaagacccggcaacggcgaagattgttgcgaaacttgttcgccaagattacacggtttccgaacttcttgttcttgacgaatcttcggttaaagaacttcgcaatttccagaaaacaacatgggaaaacacttttaaccaatgccgggttacgttcaaaaaccgcgccagtagttacgacgacagcgtagcaattacccaagacttcgcaaatatcaactttcaaaaccgcgttaagtctacggaagtttcgacgcccggcgttacagacgcgacagtagcaagcaagattgcggcgcgtcaactttcaattttgaacgttccgctttacaagtgcgacttgaccgttaaccgcaaggcgcagaacttgcggcccggaagcgtgttcgttctgaattggtcgccgttcggcatttcgaatatggttatgcgcgttacgaaaattgatttcggcgaacttacgtctaaccaaatcaaactttcttgcgtgcaagaccgcttttcgtcttcgacgcttacgttcgcaccgcccgaaggttctggatggacgccgattaacacaaacccgacgccggttacaacgcgccttctttggacgccgcccgccttccttacgtcaaacagcgaaaacgaaacactttctaacttcgatgcttacgggcgcttgtaccttgccgcagttgcgccgggttctacgtccatttcttacgacgcaatgacggccccggacaatttcagttcgtcgcccattctgtcgcttgaaagcgccccgtacaacggcggcggcgtgttgctgaacgcctacgcttcgacagtcgccagcgaaacccgcaacgatacaagcggaagccttgtcgtaaccggcgtgtcgcaagcaagcatcgaaggtttgcagcaatacacgacgctagaccaagcgcgcgacggttcggccttcctgctgattaataacgaactgttcgtttatgtgggcttcgttgacaacggcggcggtcaaattactttcccgaacgtgtatcgcggcgttcttgatacagcgccgggtaatcatgctgcgaacgaccgcgtttggttcattagcggaaccgacggacttttgcccgaacttatttcggttggaacgacgcgatacgttaagcttttggatacgacttcgggcggcaagcttgatatttcgttggccccgtcgttcagcgggtcgcttactaaccgggccgggttgccgctgccgccgcagtacctaacgcttgcgggaagccgcacgccaagcccacaagtaggcgcaacgtcgattgctgttgcatggcgcaaccgcagccgggccgataccctgttgcgcgtgtatgacgacacggcgaacacgcgggaagctggcaccgaaacccgcgttcgctggcgcgtaggcggcggcggttatacgaccgttacgactgccggaagttcgacagaccttaacgtaacgggcttgtacggcacgctagaagttattgtagattcgttcattacgtcgaattcgaaatattcgacgtacagcgattcgcttacaatgaccctaacggcaccgccgccgccgtaatcaaaagaacgacagcgcggcggttttggccttcttcaaccgcccgcagtcgtacagcatttcgaccgcttcgttaatgtaccaatcgtaatttatatcgtcgggaaattccgtcggcaagtccattacagggcgcgcgccgtcggttttcccgactttgtttccgctggatacgtaagcaatatacccggcttcgttcttcgggtaataccaacgaacgaccttgccaagataacgaccgttcttttcgccgccgccgcgcacgttctttactgcaacgaagcgccggaagtcgcggcattccttaattgtcttttcgaccggcgttccgtcaacaaggaagcgaacaacggcgtcggaacaaatcagggtttcggggttcttcgaaagaatcgaattcaaggccgacccgcgttcgcaataagcgcccttcgtttttgcgcccaactgttcgtcaataaagcgcgcttcggggtcgccgccgtcttccttgattgcgacataactattaacgtcgcggctgaatacggctttataccgcgtttcttcggtcttgtatcctgtccattcttcccaagccgcaataagcgcccttacttcttcgtgtcgcgatttgtgatacttcgaaataatgccgtcggtattgccggaaataacttcgatgccgatttgttccaaagcttcgataagcataagcaacacaagttgcccggtaatcgttacttgcaacataagttgcggcgcgtaaagcgtcgaatacttgttgccaagcttgccgaagcttccgttaatggtaatcttcaaactgtcggcaacggtcttccatttcttcgcggctgcgcggtcgcccgccttctttgcttttgccgcttcggctttggcatgaattcgcgtatttacgattttttcgtaaacggtcaagaaagcttcgcccaagtgcggcgggcaaagtctttgattaaggattgttcgcgggtaaaacgattctacgtcgttgtctgccaaaattatttcgtcggtcgcatagtgcgccgttttcttttcggtagaatgcaaaccgcccatgcctagtttgtacgtcgaaccgccgatagttactttcagcttttccagttcgggcggcatgattggcgaccccaagccgtcaagatagaagcgggcgtttcgcacgacttccagcatttcgcgaagctgcgtcgtttgatagcaaacgaagtcgggtacgtcgtaaaccaagaccgtatcggcggatagtgtgggcttcttcggataatagccaaggactttttgaagttcggagttaataaccgcttcggctacttgtgcgtctgatttcgaccgaaggtctacgccgtattcttccgacatttcggcccgcaattttaattcgggcgcaagttcgttaaacaaaagttcggtattcgaaaggtcgttgcagcaataaggccgcactatttcggcgtcttcctgcgttaatacatggtcttcgggaaatggcaagtcttgcatacgttcgcaatgcaagcgccccgcgtaaagcttcaacgaaccttgaagcggtgcaacttcgataaggtcgatatgattatatcggccaatttgtacgccgtacttcttttcgaacgcgaacggcgttaccttttcggttccatagttcggcccgcttttaatgatgaaatcggacgcttctttaagcttcgcgcagcttgccccgcgtgcggctagttcaatcatcggcaagtcataattgcgcgaattgaagccgacgatacagaaccgccaaagcatccaaagaagcttcgtcgggttaaaatcatggtcggggctgcgttcaaacgcgacgaactttccgttatcaagcgacttaaacgctacgtaaaagaaatttacgtaagtttcaacgtcgaagacgaagacacttccggcaggcattgccgttagttcttcgtccgacataaattcgacaggccgcaaagcctgccgaatgcttgcggccagcttatcgacgacgcggcttttctttgcaacaataaagccttgttcgttaatcatgcgaaagccccttaaaacggtatgtcgtcttcgtaattgtccgacggattatgcgtcgcttcgctgccaaggtcaagacccataagaacgccgcgcaaattgtcgccgaaaaatacgaccttgtttgcttccggtgcgaaatgcgctttcttaaacgcatgttcgacggaaagaagcaacttcgcagaaaagcccattcgttccggcaagccttcgattttgtacgtcgaagcttcttctttgtgcatcttcgacaaaaccgccccgtcgtcgaagaatacgtttccgttcgggctaaacgactgaatcgcgcgaacgccgttgtaaaaatcgtcgggaaccggccaagggttcaagccttcaacttcgaagacgacttggtaattcgggtaacgttcgccgtaaagttgcgttttgataaacgccccgttttcgaaatagaacgttgccgacgacgccgaaaagccgaagccggtaagggccgggccagccttggcgacagcgaccgccgcgcacttcggaagcatcatgccgggcggaaggtcgataccgtgccacgcttccagcaaggccgccccgttggtcgcgacggcgcttccggcttgcagcaagacggcggcataggtcgcattcggtgcgccgtctgtcgcaagccctgcgaccgcagcgaaggccgttttaatccggtcgtcgattgtggcgcattgcgggtcgggcgcggtaatcggcacgtcgtcgaagcccacacaaggcaccaacgcccggaacgcgccagacgatacggcaagggcgttcgcggtaagctgcgtaatcgacagttcttcgccgaccttcgacagcgcgtcgataaactgcaacgtatgcgggcacgctaccaagtcttcttcgataggatgcgcgacggtcaaaaccccgtcggaagccgccgcccaattgtgggcaatgtgcccgaactgaacgttcgtcggcccggcctttttctgcgcgatggcaacgaacttcaacgccgccaaaagcgacgccgcagggcttggccccttggcctttttctttccggctgcggcttgcctgcgcgcccttggctttttcttcggctgttcggcggctggcgcttcgtcttcgggcggaagcggaatattactgtcgattttcattttcggccccttcttcgtcaagtttcgaaattgccgcttgaagatagttcgccaagtctagcgtttcttctagcgcgtgttgcaaccaatcgcgaagcgacaacgggttattatccgtcgttacgccgtactttgcaagtccaacgattgaacgttgcaacagtaattcgcggttcttttctacgtttttatcgggcgatatttcggccatttgttcaccattcagcggaaagaacttcgggatactttttgttcacccatacgcgaacacggcgcggcgtgcgaagttctgaaacacgctgcaaagcttgataagtcgtcggcggcggttcttcggcgtgccgctgccgccaccaatcgcgcgaacgtttcgccgcaagccccggatgttcaagcattataaattcgttgaacatttggaagccgcaaaagtaactaaccttaatcatcggcggtttcgttagatttccgtttgcgtcgcgcttttcgtgcaagttgtaaagtaccttttgaacgtcgaagtattcgactatcggcgcgtcgcttcgcagcggttccagcgttccggcagtcgcaaacaacttcgtttcaaaagtaaattcggtgccgcagttaatacactgccgggccgcagcgtgattatatacgccgcatacgtcgcaaatacgaacgggcgcgtcgccgccgcctttgcccggtctgttcggaattcgcgggtcgttgattgggccaagccttcgaacgtttccggcaaagtccgcgtacaggcaattttgtttgccagtatccggcgacggtcgggttccgcgtcccaacttttgaacgtgtttgcccg

SEQ ID NO: 24 - protein, 205 aa, unidentified
  REGION 1..205: note = the amino acid sequence of tail tubular protein A of abacteriophage
MAFITKLDIVNACIKTMGETKLNTLEEDHVYKDDAVDLIDRVHRDVSSLALWFNTEWVELKPQATSKYIMVPTDVLKLDCNPSRFGHVVQRGRRLYDRKRNTYEFDHSVQAKLVRLLDFDDLPYEVQMFVRDDSVLRFQSDFDGDNTKYAKIQQQRNDSWINLKAEHIRQIKANPLFARASVDVLRQRYFNYSGHPWHSHVTFPG

SEQ ID NO: 25 - protein, 294 aa, unidentified
  REGION 1..294: note = the amino acid sequence of tail tubular protein B of abacteriophage
MGSVNTILQANNTTRIARANYRAAVAQTDNTNRSEVAKTGFSDFMRSLKNNAQLDAAAKEYNSNMEALSEELRARQGAGLNSQLQLANARGALQAQAGAVGVGGSSADLMDSMVRLQAEMDKETQDNAVALLASRGASQTAQVMARAWHGMDMSRTFGQFDYAQHIEPKAMKRRLGKLIGVAVATYFGGPMAGEAVADFAVGTWQADNGNFQGMSQSFNNAAQNGLQAWQQSNERGGKSWASTTFGYNDGTGKQSVTGAKVTGNFGNNYDNFSTTTSGLGWFDSGSGGNSGGAW

SEQ ID NO: 26 - DNA, 618 bp, unidentified
  misc_feature 1..618: note = the nucleotide sequence encoding amino acid sequence of tailtubular protein A of a bacteriophage
  source 1..618: mol_type = unassigned DNA
ttagccggggaaagtgacgtggctatgccacgggtgtccgctgtagttgaagtaccgctgacgcagaacgtccacggatgcgcgcgcgaacagcgggttcgccttgatctgccggatgtgctcggccttcaggttgatccacgagtcgttgcgctgctgctggatcttggcgtacttggtgttgtcgccatcgaagtcggactggaagcgcagcacgctgtcgtcccgcacgaacatctgcacctcgtagggcaggtcgtcgaagtcaagcagccggaccagcttggcctgcacgctgtgatcgaactcgtaggtattgcgcttgcggtcgtacagtcggcgtccgcgctgcaccacgtggccgaagcggctcgggttgcagtccagcttcagcacgtccgtggggaccatgatgtacttgctcgttgcctgcggcttcagctccacccattcggtgttgaaccacagcgcgagcgacgacacgtcgcggtgcacgcggtcgatcaggtcaactgcgtcgtccttgtagacgtggtcctcttccagcgtgttgagcttcgtctcgcccatcgtcttgatgcaggcgttcacgatgtcgagcttggtgatgaatgccat

SEQ ID NO: 27 - DNA, 885 bp, unidentified
  misc_feature 1..885: note = the nucleotide sequence encoding amino acid sequence of tailtubular protein B of a bacteriophage
  source 1..885: mol_type = unassigned DNA
ttaccatgcacctcctgagttgcctccgcttccgctatcgaaccagccgaggccggacgtagtggtggagaagttgtcgtagttgttgccgaagttgccggtgaccttcgcccctgtcacggactgcttgccggtgccgtcgttgtacccgaaggtagtagacgcccacgacttgccgccgcgctcgttggactgctgccacgcctgcaacccgttctgtgctgcgttgttgaaggactgcgacataccttggaagttgccgttgtccgcctgccacgtgccgactgcgaagtccgccacggcctcgcctgccatcggcccgccgaagtaggtagccacggccacgccgatcagcttgcccaagcgacgcttcattgccttcggctcgatatgctgcgcgtagtcgaactggccgaacgtgcggctcatgtccatcccgtgccacgcacgcgccatcacctgcgccgtctgcgatgcaccgcgagaggcgagtagtgccaccgcgttgtcctgcgtctccttgtccatctccgcttgcaagcgcaccatggaatccatcaggtctgcggacgagccgccgacaccgacagcaccggcctgcgcctgcaacgcaccgcgagcattcgccagttggagctgggagttaagcccagccccttggcgtgcacgcagctcctcggacagcgcctccatgttggagttgtactccttggcggcggcgtccagctgggcgttgttcttcagggaccgcatgaaatccgagaagccagtcttggcgacctcgctccggttcgtgttgtcggtctgcgcaacggctgcacggtagttcgcacgagcgatgcgggtggtgttgttcgcttgcaggatcgtattaaccgaacccat

SEQ ID NO: 28 - DNA, 44716 bp, unidentified
  misc_feature 1..44716: note = the genomic sequence of a bacteriophage
  source 1..44716: mol_type = unassigned DNA
tagagcgcatcaatctgttagttttttcccacagtgccaatggaggcacaacatgcacggttcgatcaacgccaatctcgaacgcacccgcaccaagcgccgcttttgccagttcaccaagactgcgagcgtcgttgacctgcgcaccaccgaatacgaccgcaagctggctgagcgcaagcgccaggccgagcggtacgaagcccgacacggaaccgctggaaagcgatctgtgtttgtcgttgagggtaacagcgggaccgcaagggcgaaccacgccgctgatcggagggcttacctgtgatccgcatacgcttctccgaccggttcccgtattcggcgtttacgtcgtggttcaatgcgcagcagcggcacggtgctgctgtgtccgacctcgttcacgacggcggatgctaccgctacaccatccgactcccgtaatgcaagctactagtccttcgcaagaggggctagtgtcgtgcaatcggcacggacccacctgaagggaaccaccatggacatcatcaccgggagcgctgacatcaagcgcgccatcaagtcgatcaacacggcccgcaccaagctggtcgatcagattcagcaggccgccgtagcggtcatcaaccacgcacatatccacggcgacgttacgctcgcttccgatctgtgtctcgccgtgggcaacggcatgaagcacgaagccctgcgtctgtatctgtccgaattcggcccgatggcgcccaacgacgacaaggagacgaaggcgagcgcgccgatgaagttcgccaagagtaagcgtgtggagggcgaggccctggccgacatgttggaacgtgccgccgcgaaggcgtggtgggacttcaagaccgaaaagcccgccgaggcgttctcgttcgccgctgacctgcacaagctgcttggccgcctggaaaaggccaccgagggcggctacgtcccgaccgacgaggagcaggccgtcatcaacgctgctcgcgccgtcccgaagcccaccaagaaggtgcaggcgtaatgctgcccggcacccgcgtcatcggagccggtgtgcgtgggtgccactgtctgaccgagggcaaggaatacacggtagaggactttcagcccgcctacaccgacccgaccagttcgagcggcttcacgtggcctgcatacgtgggagtcatcaacgacgaaggccggattggttactaccacacccacagattcaaggagaaatagcatggcgatcagttacacaaaccggggaaacaacgccgtaagcgcccgtgatctggttccgggcagatactaccgggagaaacacgacgcacgggacgagccgatcatctatatcgcaaccgatgaagggtgcgtggttgcgctggatggcacccagttcaaagtgaacccgctggaatacatcgaggtgcaggtggacgtttacgtgggagacgacgtatgaacgtcgataccgacatctgcatcaccatgccccgcgaggaagccgagctgcttcgctcggcgctgcacatcgccacccgcctggcctcgaaccttccctcagggtacggcaatcgcaagctggccgacgagttcggccgactgcatgcctacctgcgggatgcggacgtggaaatcctgaccggcaccgtgcagttcagcgagaagatcctcgatgcagtgagccgctatgtcatggccaacctcggccggggcatgcctctgcacgtaatctcgggccgcccgagcggcgggaagtccgcactggcagacaccctgctccgcgaacacctgcacacgctgcccccgcaattcgcggtgaacgccgacttcagcaagctggaagaacgggtggccgcgtgcctcaaccagcagcctttcgagttcaagcgcccgacaacgggccgcgagcgtctttcggacacgccgatgccggacaacctgccccgctttggcaagctgtgggacgtactctcggaaggcaacgcattcccaggggtgactgtcgccccgaagaagaagggctggatcgtgcagttctactgcgagacgaaaggcactggctggacgcgagtgctcggcgggatgtcggcggcaaccggagtctacgagtcacgtaacgaggcgtaccgccagatgcgggcacgcagcaagcacagcatgtgcccgctgatccgctatcgtgtggttccggaaggcacggcgaacggcgaggagcgggaccgcgggttctacaccgtggaatactacaccaggcatgggacagggccgcgcgcacctcgcggttgggccacctctggcatgccgggcatgaacggcgtcttccggaccgccacggctgcgcaagatgcaatcgataagcgcgtcagactgctcggcgagaggattcgcaagcgttaccgcgtgaagtggcacccaaaccacgcgtgatctaccgctatgccttctaacgagggcgtagctttggaaccacgcccaacaggagggcataagcaatgatccccgtaacttacaagcgcatccatagcggcaagcgcaagccgatccagctgtgcgagaagcctcgccagtggaaagagtacgtgacctatgagcacagcgtggagcgctggtatgcgtgaggtcagcctgcgccttgtggtgaaggtgctgccgctcgttaccgtggaaggtgccgctgccggggattatatcctcggcggataccacaccagccacgaggcatgcgagcaggccatcgcacaccaccgcctgcaccacgagaaggtgcccaccctctacaccatagaggaaatagaaatcccacccgtcaacgaggagaactaccatgcgtaagctgtacttcatcacgtccatcccggccaccgcaaaggatggcgtcatcactggcgtagtcgccaaccactcgggccgtgccgccacagccgaggaagcgaccgcgctggtcgagttcctgcgggagaagggtgcgtcgcagtccctggtggatgcgctgcgcgacggcacctatccgaatccggtgtcggtctttgaccggcgcggcgccgcacgtgccgaggctgctctgctgaattcgttcggtggcctgttcaactggtccgtcatcgcgctgggcgagagcatccgcaagccggtgcgcaagccgctgggttggcgcatcaagttcgacggcggctgcgtcagttgcttcaacagcactgactacggcgctacggtgcgcatcgacggcaacgaggagaaccatagcaaatacaacctgctgttcccgacccgcgaggcggcgcgccacgccctggacaccgaggtcggcgaggactgcaagcgcagccgccgtgacccgtggggctactacgcggaggcggtgtatgcgtaagctctggctgcgcatcctgatcctgctgtactggatcgttggccgtggcccttgggttgtcatcggacaatactacgacgatgaaggtaggctgtgccggttccgcaccggcccggcgtacatggggtgcacgctgacgttcgatgacatcgacgacgccaacaactactgcgcccggcgcaactggcaggcagacaccgacccactcggcaccacgtactacgtgtggcacgagatggagttcaacaacttcggacacaggagaaagtgacaatgggattcctcgacaagatcaagaagggcgcgcagtacatcaaggacaagttgaccaacgccatcaagcccgagcgtgacgacgacgacaccacgcctccgcctgcggtgaacacggcgaactacctgcacgtaagcgtgccgctggttcccatcgacaacccgatcctccgcaagatgctggggcaggattacttcccggtcgataaggggcagggtcagacccgcaacatcggcaacaaccacctgaagagcgtggccgaccacctcgggcacaacaacaagcagcgccgcaagctccgctctcgcatgaagcgccgcgccgccgagctgcgtgccggtgcgccgctggtgggtgcagcatgagccgggtgctgggtagttgggtcgaggtggtagtgccgcaatcctgcgctcacctcgaagccgtaacggattcgctggacgctgcggtgcaggctgtcggtggctgtactatcaccgagcagaccgggtactacaagcgcgaggacggtacggtggactacgagaacgtgttcaccgcgcgttacgacttcgacatcgacagtccgaacctggacgccatgctgtcggctgtgcgtggagtggtgcaggcgctgctcgaagcgggtgaggagtcggtgctgcgccgccggtactacgccccgagccgatccaccccgttcgccaaggcaccgggctacaagtccgagctgatcttcaagtaaatctcgcactgatttgcgtgccggaagggaccacgttacggaccaccaatcaacccgtcaatgaaaggagatacacaacatgtcgaacgagaacaccaacgagcagaccaccctcagccactacgaagcgaagcgcgccgagctgctggaagacatcgccaaggcgcaggccaaggtcgataccctggccgagaagctcgccaagctggacgctgtcgaagccaacagcgccgccatcgaagcgctgaagtccggcgactccgtgtcctacctgttcggccgcgccctgaacaagcgtgtcctgtccggcgtggtcgtcgccaccggcaagaacgacaagggcgtgctgcaactgaaggtgcagaccggcgaaggcctggatgccgagctgaacctgatcgacagcagcgccctgctgatgtcggccgaggaagttctgaaggcgcaggaagaaatcgacgccgccaaggccgccgccgaaggcggtgcgcagtgagcggcagcccgggcatcggcccgacccgcacgcagttcaccgcaggccgtgacctgaagccaggcatcggttaccgtgccatctcgaccggcgccggtgaggtggtggacagcgaccagtacctgctggtcaccaacgtgaccgacaagaagggcaaccgtcagctggtcaacaccagcaccggcgaggtgtccttcgccacgcctggctccatctggagctactgatccgacgaggatagcatgagcaataccctccccgataacgattggctaccacacgccgagcgcctgcctgttggtggccgcacacgagtgacccatgagtgcggggagggtacttccctgctgattactcgcgagcatgacaagtccaccgcgtactgtttcaggtgcggtggcacaggattcaagcatgagcacgagagtatagaggccaagcttaaacgaatacacgccgagcaagcgagcgagcgcagagtgcgcgaaactgttgagttgccagagccacgggtatacgacacccgcgagtggccgctcgatgccaaggtgtggttcttcaagatgggactctcgcttcagatgatcggcaagctgcggctgtactggtgcccgagcatcgggcgggtggtactaccgatcactgaaggcgacgacgttgtgtactggacagcacgaagcacaagccgtcaacccaaatggttgactcctgatgtgccgaaggatgggcttgtcgtacgctacggcgtgggcaagggggacaccatcgtgctatgcgaagacccgctatccgccttcaaggtgggccagtgcacagaagcgtggtcgttgctcggcaccaagctgcacaacaaagtgttgaagcagctgactgatcgaggccaacgtgtagcgacgtggctagatgacgaccgaggtagaagcgacggcagcaatcccggccaagacagcgcgcgagtaatcgctgcgcgtctgcgtgcgtttggtctggactacaggaacataacgtcaccgcgtgacccgaagtattacccgaccgattacatagaggagaagttatgtcaacagacctagccagtcagcgccgagcggtagctgtgtctttagtggcgcgcttcctatttgagagggacgacagcctctgcgattatgaacgaacggattacgagcgagaggaaagcgccaagctaatcgtccgagaggtgcttgaaatctacttgcaaggagaacccgatgagtcttgaaaccacgctgctgcggttgtgcaccaaccgtggaaagttcgagcggctcgtgcccagtgcaccacgtgacgggctggacgagctgaccgtgctggtgctcgatgcgttgcgtgcgtactacaaggagttcccggacacgaaggacttgccgttcgatgtgttcgatggctgggccttggagttcaagtggaagacgcagcccgacgacaagaagtccctgctgaaagttctgctgaagcagatgcgcgagcctgtcccgcccgaagcagagcaaggcatgatcgagaagctgttggagttggagctggcaaccactgcggtcagcaagatcgtgcagtggaatggcggcgccgagttcagcctgcgcgacgagttgtacggattggccgagtcgatcaacgaccgcatggatcgcaaggcccgccttcccctggtgcaggagacgcccgaggaactgatgcagatggacgagcacgacatcggcatccacttccgcctgcccacgttggcccgcaacctgcgcgcccttcgtggtggtgacttcggcatctacgccatgcgccccgacgcaggcaagaccacgttcctgacgagcgagtccagccactggatcacgcagctggacgacgtgtggccggaccagaagcgcaccggcatctggctcaacaacgagggaccgggcaagcgcatcaagcagcgctggtatcagtcgctgctcggcgctaccatcccggagatggtggagtgggcgaaggacggcagcatccgcaagcgcatcgaggatgcgatgggcggggacatccaccgcatgcagttctacgacatccacggattcaactccggcgaggtcgaggccatcatcaagcagaccaatccaggcttcatcatcttcgacatgatcgacaacatcacgttcagcggtggcatgaccaacggcggacagcgtaccgatcagatgttggaggcgatgtatcaggccgctcgcaactggtgcgtgaagtacgacgccgttggcgtggcgacttcgcagatcagcgccgagggtgagggtgtgcagtacccgccgcagtccgcactgaaggacagcaagacgggcaagcaaggtgcatgcgacttcatcatcatgggcggcaagctcaacgacccggcgatggaacgcttccgctacatcggcactccgaagaacaagctccaccgcgcaggcggtaagcgcgacgttcgggaagaagtgatgatggatgcagagcgtgcccgcttctatcaggaggcagcatgagcttcacttccttcgacctcgaaaccacgatccgtgccacgctgaagcgcaaggccaatccgttctacgacttgaacaagatcgtggcgattggctacaagcgcaagggtgatgcacagaacaccggcctgtactacgacacccgcatcggcgccgacaaccagtacatgggaggcgcacctgacgggtggttacgggagctgtgctacaacacgcagtacctagttggattcaatttgaaattcgacatcctgcacgccatctgccaaggcccgctcaaccggcaggcatggatcgagttcatcgacggcggcggcatggtgtgggactgtcagctcggcgagtacctgctgcacggcatgacgcaagagttccacatggcgagcatggacgagacggctcctcgctacggcggcaacctgaaggacgacgcagtcaagtccctgtgggctgcgggcgtggacacctgcgacatcgacaagacgttgctgatggattacctcctcggcaccaacgacaccgacgacgtaggcgacatcggcaacaccgagaagatgttcctcgggcagctcgccgccttccgtgcacgtggcggcctgcgctcggcgctgctcaacatgggcgcgctgtgcttcaccatcgaagccgagtacaacggcatgtacgtggacaaggactgggctctcgcgaaggcgaaggagttggaggtcgagctggcaacagcgacggccgaactcaacggcttcatccccaagctgcccgagggcctgaccttcaactggaacagccgcttccacaagagcgcactgatcttcggcggcaaggtgaagtacacggcgaaggttccgatcatgtccgccgaaggtggcccgacctacgtccagaaggacgaggtgcactacgtgctggtcgatggcaccacgactgcgacgccaccggccgaggacttcgagaacgtggggcggtacgtgacctacggaagcggcaagaacaagggggagtacaagaccaagaaggtcaaggtcgatgacctgaccaagcagaagttccgcaacgaggacatgctgttcgagttccccggctacaccgagccggatgctgcgtgggaaagcaagagtgatccgggtgtgtactccaccgccgccgatgtgatcgaggcgctgagctaccgaaacctgccattcaccaaggcactggcccggcgcgccgacatccacaaggacttgtccacgtactacatcacgacggacgagaagaccggcgagcagaagggcatgctcaccctggtggggccggacggtatcatccaccacaagctcaacatgaccaacacggtgacgggtcgcctgtcatccagcgatcccaacttgcagaacgtgagcaagggtgagctggacgaggagacgttggaggagaagggttcgcagatcaagcgcgccttcgtgtcccggcacaagggtggcaagatcatccagtcggactacacctccctcgaaatctacgtgcaggcaatcctcaccgagtgccgtcagctgatcgaagacctgaaggcgggcctagacatgcactgcctccgtgccgagcaggcgtggggtgagcaaggcaagtacgactacgacttcatcctcaaggcgagcaaggacgacaagcatcccgagcacaagaagtggaagaagaagcgtggcaacgcgaaggtgttctccttccagcgtgcgtacggtgcaggcgtggcgaagatcgctgcgaccaccggcatgtcggaggacgaagtcgaggcgctggtgcgcggtgaggccgagcgttacccggagctgggtgcgtacatcgaccgcatggtcgaggccatcaagcgcaaccgcgtgagcaccaaccgcttcgttccgcacccggacgcaggtcgccagggtgtgcccgccgggctgacctgtcagctgggccggtctcactggaccacgccggacggcaagatgtattccttcagcgagtcgccgtccccggtgttcatcgccaacaagcccgcgagcaagggcggctgcgcgcagtcgttctcgcccacggaaatcaagaactacccgatgcagggcaccggtggtgaatgggccaaggctgcgatgtacgtcagcctgcgcgccttctaccgcaagtacgttaccgaaccgaaggaatggttgggccgtgcgctgctcgtgaatcaggtgcacgatgccgtgtacgtggatagccacggcgacatcgcaacaaaggccgctgctctgctgcacgcctcgatgctggaagcgtcggtgtacatggagtggtggttcaactggccgctgcctctcggcgtcccgtgcgaaaccaagatgggcgacaacatgatggaggagaagaaccctcccgcagagttcgccggtctggtcatcgagtaccgatcgtcgatccgcaaggacttcgtaggtaatcacaacccgtcgtttgaacaaggagaactacacgcatgagtcttgacgcactgttgaacaaggtcgccacccagggcaaggatcagtcggtcgccagtggtggcagcttcgactacaccccgcccgctgccggtgtgaccaccgcccgcatcgtcgggtactacgaacagggcaagcacgagttcgagttcgaaggcaagaagaagacgcaggacgaagtcgccatcgtgttcgagctgaccggcaagcagcacccgcacatcgaaaccgacaacggcccggtgccggtgcgcatgaccctgacgctgggcctgtccaccaacgagaaggcgcactacttcaagatcttcagccgcctgcgcaccgaagagcgccacttcgtgcagctgctgggccagggtgtgctgctggaggtcgtccacaagaagggcaagaaggacccgaccaaggtgttcgccgaaatcgacaaggcttcgatccgcaagccgatcatgccggtgccggagatggagagcggtatcccgaccggcaagttcgtggacaccgtgatcccggtaccgcagcagatcaccccgctgggtgcgttcatgtgggacttcgccgacgccgagatgtgggacagcatcttcatcgaaggcgagtatccggagcgcaaggacgagaagaccggcaaggtcatcgccgaagcgcgcagcaagaaccgcatccagctgaagatcgcctcggcgctgaacttcaagggcctgccctgctacgactacgccgccgccaagctgtcgggcagcacgacggtcaccaaggaaggcatcgacgccctggacgaagtggtcggcgacgtggcgcaagccccggccgccgcaccggccgaggacaagccgccgttcccgatggacggtaacgacccgatggcgggcatcgcctgatggacctgagcgctctcatggctgcggctggtgagcgctccccgatgccggtgcaggtggtacgtcagcacaacccgcgcgtgatcgctcacgttgacggggactacatggcgtacttcgcggctggtagcgagaactgctcggcgggggatgcacggcgcaacgtgctctcccgctgcgcacagctgaagcacatcagcggagcgggcaagatcgtgatgcacctgacgcatgccgcgtctaccaagggtgatcgcttcctcgctgctaccacgcagccgtatcagggtcagcgccaagcaggccgcaagcccaacaactgggcgttccttcgtgagtggatggagacctacgagggcgacgctttcactcccaaaatctggctgactcgcgaggccgacgacggcatcgcatacgtcaacgagggtgcagcattgcaccacaacgtactgcacgtggtgcacagcgccgacaaggacatgcgaatgttctgtggcgttcacgtagactgggatggctacggtatcacggaggttccgctcggcgcttacgacatcgtgggcgagaacggattgcagtacggtcacaagtggttctggatgcagatgctccacggcgacagcgccgacaacataccgggtctgccgaaggttggcaaggtcaaggcggagcagctgcttctcgacacgaaggacaacctcgaagcggtgcagctggtgagtggcaagtacagcgaggtgctcggcgccgactggcgcaagaccttcgccgagcaggccgtgctcctgtggatgcggacggatcgcgacgctgaactgctggacgtgctgaagctcgacgtgttcgggccgcagctgaagcaagcattctacgacctcgccgaggacgtgaacgagaagcgcgcaatcctggaggcatacaaagcatgagaacgaagtggacaataacgtgggcgtggatcaagtacacgcccaatctccggtgggaaaccctgaagtcacggtaccaatcgtggcgttccgttatcggggactacccatggtgaagcgactcactgcaacgcaagtcaagctgctgcgcatcaagttcgcagcggagcagggcaaccgatgctgtctctgtcaggggcagttcggcccgaaggctccgctcgatcctgtcctggaccacgaccacaagaccggcgctgtgcgcggggtgctccatcgcggatgcaactcgctgctcggcaaggtcgagaacaacgcaggccggtacggcgtgcgcgatgtgttcgcattctgtgcgggcatccccaactacctgcggtcccacctaaccaacatcacggggtacctgcatcctacctacaagaccgacgacgagaagcgcatcgctcgcaatgcgaaagcgcgaaagcgtcgggcactcaacaaggagacaccgtgaccctcacacagttcattcgccgagcaccgaagcgcggcccgaagattctctgcctcgacatcgagacgttccccatcgagttctacggctgggggatgttcaacaacaacttcagcgtcaagcagatcaagcgcgactggtcgctgatgtcgttcgcttgcgaatggctggacgatgaggagtcgttctacatggaccagcgcaacgtgcgggacgtgttcgatgatcgcaagcagggcaaggcgctgtggcacctgctcaacgccgccgacttcgtgctcgctcgcaacggcaagaagttcgatctgcgcaagatcaaggcgcgcctcgccatcctcggctttccgcctgtgtcgcctgtgcaggtgatcgatccgctgctgctgaaccgcgccgagttcgcgttcacctcgcagaagttggagtacaccaccggcgtgatcgtgccggagctgcgcaagtacgaccaccacaacttccccggcttcgacctgtgggtggcctgcatgcagaacctgcccggcgcgtgggacgagtgcgaagcgtacaaccgcatcgacgtgaagtccatgaagttggagtacaagaagctgcgcggctggtactcgcagcatccgaacgtcgccgtgtactacaaggccgatggcagcgagcaccgctgcaacaagtgcggctgcaaggaaatgatcccgcaggatgatccggcccgcacgcaggtcggcacgtacctcctgcttcagtgcaccatgtgcgatggcttcagtcgtgggcgcaagctgacgaccagtgccgaagcgcgcaagcacatcaccgtcccagcataaggagaagcgcatgagacttaccgacgttcgccacggcgaccgcgttcgctacaccggcactgccccgggcctcgtcggtaagtccggcgtggttcgttcgatcagtgcagcagatgttggtgttctgttcgacggccagctgtacgactccgcgatcaagccccagttcctcactcgcctgatgagcgtgggaggtatcaccaccacacacagggaggttccattgcccgagcaactgaactaccgtaacgaggacgagcgcacgtcgtccgaccggggcgtcggcctgaaggatgacggcggcaagccgcaggcgcggctgctgtacgaaggcgtgccgcgtgccctggcccgtgtcatcgacaccctgaccttcggtgcgcagaagtacaaggcgcactcgtggcagttcgtcgagaaggcggccgaacgctatcaggatgcgagctaccgccacgacaacaagcgctgcctcggcgagaagctggacccggagacgggcgtccaccaccgggcacaccacatcatcaacgagctgttcctgttggagctggaactgcgcgaggaggagaagggttgacggcctgcgtccgctgcggccaagtgcatcggtacgtcccacatgaggccgagtgggcgcgcttcgtagaggagcaccgtacccgcaagcaattcgatgtcgagtgggcgaactcactccaccatcgcacataccctgacgacgccttctgcatcctcgtgatgaaggggcgcgcaggtttcgttccattcccgtcgaaggagaactgaatgctctacaagaaccagaccgccatgctcatcaagtcctacgagaacaccgtggcgtggggcgagagcgccgaccacgaggaggcgttgcagaacgcggtcaaggcgggcttcccgaatctgccggaagcagaccaggccgaactgtacacccgcatcgccgaccagtgggaaggctaccgtggttcgctcgccccgcgcaagctgtggatcggcaccatcgtcaaccagttcatgtcgtcccgcatcgctcggttcaacgccgcgctgggtgacggcaccgctgcaaccgccaccaccgccgtaaagaagaagggtgcgaaatgagctacatcgtccacaaggcagtcgagcaggacaaggtaaagaagaagctgcggcccaccgaggagcagctgcgcaccgagtacatcgcccagccgaagtacgacgggtgcaacatggtcgccatcaagcgcgggcactgggtccccgccgtggacaagggcatgcacgccatcaaggtgaacgactggcagatgcaggcggtggatcgtggcgtggttgacctgttctcccgcaccggggagcaggtggtcagcgcgcaccacatcgagaacgccctcgcagcggcgccgttcttcccggtcggcgtgtacttcggggaatactggcacccgacaatcgaccagcccaccgtcagcggcatgttccgcaagaaggacggcacgcagtacaccgagccgatgttcgtggtgttcgacttcgtgacgctggaagagtgggagcagggctacagcgacctcgtgtatcaggagcgcgtcagtcgtctgccgatcctggggcactccatccccgaaggcgcggcgcccgtgttctacgcggagtcgcagggcttcctgatcgaccaagacatgggcagcatggaagcggcgaagctgctgtgcgagggcggcgcgtacgatggcctgatcctgcgcaagccgagcggcaagtggatgaagggcgacaagggtacgaacggcgaagtcatcaaggtcaagccgaccctgacgctggacctgcgtgtggtcaagatcaacatggctaccggcgagaagacggggcgcgatgtgtggaccgtggtcgttgacctcggcgatggcaagacgcaggaggtcggcagcggcgtgccgcacgattccgctgcgctgccggtcgagggagacatcgtggagatcgaggccatgtccttcagcaagtacggtctgctgcgcgagccgcgctacaagggcatccgccacgacaagacggaggccgacctgtgatcatcgacctgggcgagttcaagcgcaagagcggggatatgacgagcatccgcgccaccgtggacggcgaggtgttcgagttgaatcgggtgttcgatccaacctacgaggaacacttccgggagcacatccagcgcggcatgttcctggaattgatggagcatatctacgacaaattcatgaaggagtaaacgatgctttcgcaagtggaactcgaactggaaacctacgccttcggtaaggagcgcatggagaagtccatcgcccgtaacgaggagaagggcggcgcggacaacaacccttacgcccaagcagtgtaccgccggttcgtgcttccgcttgcggagcgcatccgcgcagacatcgactccccgcgcatcggacgtgcccaggcccacgtgccacttctgcgcgccaagtacgatccggagcgtcagaacaagcgtgggcagcccgtgagcgccgaggaacaagcccgcgagtggtacgaggctgtggccttcgtcgccgttcgcggtgcccttaccacctgcatgcgtgacaagcacggcgaaggtagcgaccgagacgtgctgaagagcgttggcaccaacgtgtaccacgagtacctgttgacgcagttcgccgacgctaagccgaccctgttctaccacctgatgaacgacatggaccgcaagctctctgtcaacgagaaccaccgcatgacggtgatgaagatgcagggtcgcaagaacggcgtcgagttcgtggagtgggggcaggcgcagcgcgatcaggtcggtgcctacctgacggatcagctgtcgcagctgggtatgctggaaatcggcgtgctcaacaacacgcagtacaaggacggtcggcgtacgcacaagaccgaggtgaagataatgctgactcctgcggtgtcctcgctggtgcagcagatcagcgacttcgtgatcgaggctactccgttcttcctgccgtgcgtcgagccgccgcgtgactgggtagcgattgacgatggtggtttccacacccaggagatgcgccgcctcaacccgtggatggtcaagacgtatgcacagacccgcgacgactaccgtgatgcgggactgaacaacgagatgcgggcgatcaacgcattgcagcgcgtgccgtggcgcatcaacaagcgcttgatggaggccgtgtccagcatcgccaaggtgcacgacatggacgaaatcattgcgcagggtgaactgcccaagccgcgcaagccggactggctgacgaaggacatgaccaaggaaacgatgtcgcaccagcaggagctggacttcaagaagtggaagcgcgacatggcgaactggcataccgacgagcgtctgcgccagaacaagggcaatcgattctacaacgcaatgaaggtggcgcgcaagttcgccgagtacccgagcatctacttcgtgtacttcgcagacttccgtggccgcaagtacgttcagaccaccggcgtctcgccgcagggttcggacttgcagaaggcactcttggagttcgccgaaggcaagccgctgctgacgaaggacgcgcaggattggttctgcatcacaggagcaaaccgatggggttacgacaaggcgtcgctgccggaccgagtgaagtgggtgcgcgagcatcacgaccagatcatggccttcgctgcggacccggtgaacaacgacgagtggaagacggccgacaagccgttgcagtttctgagctggtgcatggagtacgagcagtggcaaatattcggggatcgcttcctgagccgcatcgcagtcgggatggatggttcgtgcaatgggcttcagaacttctcggcgatgctgcgcgacgcagccggcggggtggcgacgaacctgatcccggcgctgctgccgaatgacatctaccagatggtcgcagaccgcgtgactgcgatcctactggccgagcaggaagacgaggcagggttccgcaccctgtggctcgaccacggcctgacgcgctccctggtgaagcgcagcgtgatgaccctgccgtacggctcgaagaagtccagctgggcagacttcatcgtggacgactacctgaaggaggggaagttccccggcctcgacaaggcgctccacatgcccgctgcgcgcttcctgagcatccgcatgggggaggccatcgccgacaccgtggtggccgctgcgggcgcaatggcgtggttgcagaaggggtccaccgcgatcctcaaccagggctacgaccgcatcaagtggatcaccccgtccggcttcccagtcacgcaggtgtactgggaatccgacgagcaccggatcaacaccaagctgtgcggcaacgccaagctgtcgatccgcaagagcaccgacgaggtgaagaagtcccggcaccgcaacggcatcgccccgaacttcgtgcacagcctggacgccagccacctgaccctggtggtcaacgccgccaaggccgagggcatcgacgccttcgccatgatccacgacgacttcggcacccacgccgccgacagcgcggccctgtaccgcatcatccgggaggtgttcgtgggcatgtacgagcggcacgacgtgctctcggccttccactcggcctacccgttcctgccggagccgccgccgatgggcgatctcgacctgcgccaagtccttgattctccgtacttcttcagctgacggagtttcagtacacctacagctgagagggtggttggagcggccgcgaaggtaagcggaaccggtgccacccttttggtacacctacagctatgaggagacaccgtggccgaagacgccaaagtgaaagtcctgatgacgctgcacccgaaccagcttgccgccgtgcggcgactgtccgggctgtcgctgtccgtcaactcgaataccacgcccttggaggcaggtatgcagttggggatggctcgcgtcctgaacatcctacaggagggtttcaccgttgattcctccctacagaacaccaacgacgggtgatagtgagcagatcaaggcggctttaacggccgctttgtatctgtcctctagagaagatagtaaagtagacaatagagaatcctctgtaagctacaactgtgatgatcctgattatacagtagctctgataactcagaacttagtagatgcagtaatcatagatgaagcttatctactatgctttgccattgtcacaccgtggtattccaagaaccgtactacgttcgttgagaacatggtgctgcgaattgggccgggcagttccttcgaccggtacatagccgtgatggaacacttggctgacatcaaccactgcgactcactgagtgcaggtggcgcactagctcggaactcccgagcactcacacggatgtatgcacgctacggctacctgctggaacgtcatgctccccaattcaccaagcgaaggagttaacctatgggtagcatccttggtggtggctctgcgaagaaggctgcgctgaagcaagcggcggctatcgacaagcagaccaacctccaaacccaatccacgaactaccagatccaggcgatggccgatcagatggctcaggcagctgcacagcaggccgcatccgagtacgccgagaagttgctgagtgcccctgtcgataccgtcgatgtgcggctgggtacttccgacctcgacttgcagaccgccgacttgatcggccgacgcaagaccgcccgctccgcctacacccgacccgtgaccacgaccgcagcttcccggctgacgactgtggccgggtcggacctgttgtgaggtgagcatggaccactcgatccaaaccgcgcatcgccagttcgaggcgtacgacaacaagcggaacggcatcatgtaccggctcgaacgatattcgagctggactgtgcccaagctgttccctcgcaagaaccgcgaccaggacaccgagccgctgagccacgggttccagtccctcggcgcgcaggcagtgaaccatctggcgaacaagctgatgatgtcgctgttcgcaccatcccgaccattcttccggttggagatgaagcgcaaggcgcgggaggcagcgcaggatcaaggcctcgacttgcaggctatgcaggcgatgcttgcgaaagccgagcaggatgcgagtctcgaactcgacaagcgctcgatccgctcccgactgtacgacctgctgaagatgctgatcgtgctgggcaacgccctgatggtgttggagaaggacacgatccgcgtgctcaacatgcggcactacgtggtcaagcgcacccgcaccggtgaagtctacgaactgatcatccgggagaaggtgcacaagacccagctggaacccgcagcactcgctgccattgtcgcacacccggacttcaagccggatgatgacggcatggtgtgggagtacaagtggctcaagctggaccaccagaccggcaagtacaacgaagacgtgtggatttgcaactgcaagctgcccgccaacttctcctcgtcctactccgcagacaagctgccctaccgggcggtgagctgggacttggccgcaggcgacgactacggctccggcttggtcgaggactacgaggcagacttccagtcgctctcgatgctgtccgaggccgcagtgcagggagcgatcctcgcatctgagttccggtggctggtgaacccggcaggccagacctccgtcgaggacttcatggcatcgcccaacggcgcggccatccccggcatgaagggtgacatcgagctgatcaacgcaggcgtcgatggcgtgctgcaaaccaaccaagcaatccagtccacctacatcaaccgcatcggcgcaggcttcctgttgcagacggcggtgacccgtcaggcggaacgtgtgaccgcgcaggaaatccgcatggtcgccgaagaactggaaggcgggctgggtggcggctactcccgcatcgctgcggacgtgcaggtgcctgtcgccttttgggtgatgaacctcacgggccgcgacatccggggcaaggacttggagcctgtcatcatcaccggcttggccgcgctctcccgaacgggtgaccgtgaccggctgttggagttcggcagcaacctcgccaacgtcctgtcgctaccgccacagatcctcgaacgactgaagctgtccgcgtggatcgccgacctcgccgccgctggtggtttggacccgaacgtctacgtgctgactgaggccgagtacggccagatgatgcagcagcgtgcgcagcaacagctggtcatgcagaacgcatcgcagcagatcgacaacgccaacaacatggagacacagacacaatgagttccaatgcacctccgggcggtggtcccggcgcaaccgtgatcgcaacctcgcaaggcaaccagaccgcaccggcagcccaggctccggccgacgacaagctgctgaccggcggccaacccgcacaggcgcagcccgcagtccccgcagcacctccggcggttgacgcgctgagcctcgaacccaccgcgcctgcacagaccaccgctccggcggccgctgcgccaactgctgtgtcgattccggactacggcgacaacggcctgaacatcgcggccgaatacttcgtcaacaccgtcggcctcgacatcgacagccgcgaactgaccgaagcagcgaagggcaacttcgccctgctggaagccaagctggaagtcctgggcgacaaggccaagggttccgcaccgatcctcgctctggcgaaggaaagcatcgctcgcgtcaccgccgctgcaaccgcagcgcacagcgcgaacgttgctgctgtccacgaagccgtgggtggcgcagagaactgggctgcgatccagcagttcgcacgggccaacctgcccgccgaccaactgaagcaggcaggcgaagcgctgtcggccggtggcttcggcgcacaggcgaccgcgcgctacctgatggctctggcccaggccaaccccgcgacgaccgtcaagggcgcaccggctaccaacgccgccgctcctgccgcgtcgatcaacggcgtcgctcctatcacgaaggagcagtaccgcgctgagtaccgcaagctggttgccgagaagggcatccgtggtgcggcccactccgaagaactgcgtgcactcaacgcgcgcgtcatccactaagacccaaggagcaacataaagcatgagcaccatcttcccgaccgtcaccgttctgccgaaccaggtcaaccagtccggcaacgagaacgccctgatcctcgaacagttcaccggcgacgtcgagcacacctacgtgtccagctcggtgctggaaaagttcttcccgcgcaagcaggtgaagggtaccaacaccctgaccaagaaggccatcggccgcaccaagctccagaagctgaagcgcggtgacgcgccggacggcaccccggtggacttcagcaaggcgtcggtgaccgtcgataccatgctgctgtcgcgtcactccatctggcagctcgacgagatcttcaccgacatcgacacccgcaaggaaatcgccatcgagcagggccaggagatcgccgagttcgtggacctgaccatcagcatcgctgcggcgaaggccgcgtcggccacccagtccatcttcacccgcaacggccgtgcgccggaaggccacttcggtgccacccaggtgaccctggcggcggcgggcgacgagaacgatccggccaaggtgtacgcggccatcggcaagctgttctctcgcatggaagaggagaagaaggtcaagccgcagcgcgacggcgtcgtcctgatcgtgcgcccggcgatcttctacctgttgcagcaggccgagcagatcagcaacggcgagtacctgacctcggacggcaacaagctgaccggtatcccgaccttccacggctggggcgtcccggtgctgtcgagcgagaacctcccgaacaccgtcatctcgggtcacctgctgtcgaacgacgacaacgacgacttctacgacggcgacttcagcaccctggtcgctgtggccgtgtcgccgaaggccctgatgatcgccgaagcgctgccgttgcagtcctcggtgtggtggagcgacgcctcgaagtgcttcttcgtggactcgtggatgtccttcgccgtcggcctggatcgcgtcgagaacgcgggccgcatcgacaaggctgcctaacccgctgggcgcggtccctgaatccttcgggtaactcaaaccgcgccttgccttccaccaacacaggagcaccatcatggtctttgaccgaccgttcgaaatttccaaccgtgtcgtcgccgcaactggcgtggccggtctgcccgccaactccgtgggcaccgtcgtcggcgtccactacaacgccatcggcacggcctgggtcgtgcgtgtccgcttcgtcgatgacgaaaacggctcgcaggacgtggagtacgcaccggcctcgctggccctggctgcgaactaagcaacatcctggcaggggcgctccggcgtctctgccttgttcctctcaggagacaccatggcattcatcaccaagctcgacatcgtgaacgcctgcatcaagacgatgggcgagacgaagctcaacacgctggaagaggaccacgtctacaaggacgacgcagttgacctgatcgaccgcgtgcaccgcgacgtgtcgtcgctcgcgctgtggttcaacaccgaatgggtggagctgaagccgcaggcaacgagcaagtacatcatggtccccacggacgtgctgaagctggactgcaacccgagccgcttcggccacgtggtgcagcgcggacgccgactgtacgaccgcaagcgcaatacctacgagttcgatcacagcgtgcaggccaagctggtccggctgcttgacttcgacgacctgccctacgaggtgcagatgttcgtgcgggacgacagcgtgctgcgcttccagtccgacttcgatggcgacaacaccaagtacgccaagatccagcagcagcgcaacgactcgtggatcaacctgaaggccgagcacatccggcagatcaaggcgaacccgctgttcgcgcgcgcatccgtggacgttctgcgtcagcggtacttcaactacagcggacacccgtggcatagccacgtcactttccccggctaaggaggcatcatggcaaaggcaggcggaacctatcccgacatcctacagggtgtcagtcagaaaccggcgcatcgtcgtcgggcgggtcagacgcacgagcagatcaacgtgctgtccgatccggtgaatggcctcgtgcgccgtcgcggtacgcggttcgctgctgcccaagccgttgtcacctcggccgaactgcgcaacatggacgtgttcgatttcatgcaggagggcaaggagtacgcgctgctgtatcggcgcgacgcctcgtcgtccagcagtgcgacgttcgcgttcctctacaacaagacggacgaggcgttcatcccgttggtctacgagaacagcacgtgggtcaacacgttggtcagcggcggcgcgtcctctctcgcggccatcggcagctacgtctacatcgcgggcaacaccacgatcccctcggccaccagcaccaacgtgtggcaggagcagacgaacatccagcgcctcgccgcgtgggtgcgcaccggcaagtacaacaccacgtacacggtgaacctgacgcgcacggacaacacggtgctgacggtgacgttcaagacggtgaccgcgtcgtaccccggcacgctcgacacgagcgacatcccgttctacctgcccggcggcacggagccggacgcggcgtaccagaagcacgtcaacgaccgagtgaacgagtacaactccgcggtcaacgagtggatcgtgaccagcgccgagcagacgcgcccggagtacatcgcggagaagctgtcggatttgctggtggacgcaggagtatcttcgacgtacatcaagggcggtatcgtcattgacgacgaccagttcaaggacatcacggttgacgacgagggcgacggcacgaccttctacgccgcagggcaggagattaccgacgcgacctacgctgtcaagttccactggcacggcaagatcatccgcgtgcgcccaagcggtgcaggtgctgacgagacgtactacctgcgcgccgagttggagaacggcgagacttctggctacggttcggtggattggtacgaagcgcctggcgtggagtgcaccatcgacaacctcgtgtcgcagctgtacatctacaacggtgtgggctacatcgcacgcaacggtgcgggcctcacgtccctggctccgggcagcggcgcacacccggcttacggttcgcgcgtcgcaggcgatggtctgacctcgccgatcccgtggttcgtcggcaagccgatcacgatgctgtccgtcttccaagaccggctgatcgttggcgcgcagaactacgtcaatgcgtcccgctcggcggactacctgaacttctggcgcggctctgccgtaaccatcgaagacagcgaccccatcgaaatcttcgcgcacggtagcgagggcgacgtgctccggcacggtacgctctacaacggcaacctcgtgatcttcggtgaccggcagcagtacggcatcagcggcgactcggtgttcagtccgaagaacccgctcatcaaggcgttcagtgcgaacaaggattcggtggacgcaaaggcgcagacctcgggcaactacatcttctacgcgcagtacggcagcgaaggtacgagcctgcaccagatgcgcgtcggcgcactcaacgggcagcagacggttacggacgagatgtccaacgagctggactcgtggctgtcgggcacgccgttgcagatcaccgcactcaccgcaccgaacctcgtgatgttccgcacgcgagagcacccgcaggacttctacctgtaccggtacgaggacaacaagaacaacgggcagcgcatcgtggacgcttggtcgaagttccagtaccacccggcgctgggcgaaatcatcggcatcagcagctacaagaagaacggcctcgtgttcaccgcgcgcggatcgctggtggcgtgcgacgtgttcgatccgaagggcgagccggactcgcatgcgtgcctcgatagctgggcgcgtttcggtacacctacaggcgtactgaccgcgagcgcgagcatcgccgtcaacaagactagcccgtacttcctgctgggttgtccctacgctcaggcgtccgacttccttacccagttcgatgacctcgacgctgatgcgttggagtatggcgtggtgtccgaggcgctggtgattccgaccaatccgttccctcgggaccagaacgggcaggctgtgctcgacggccgcatgtcgctgaacaaggtgacggtggacgtggaggacacggcgggcatgctcgcttcggttaccacccgcaacgggagcatgaccaccactgacttcgagggccgcatcctcggcgactccgacaacctgatcgcgcggcaaccggtgtaccgggggcagctgaacatcagcgtcgggcgcgaagtgcgcgagtgcacctacgagattcgcagcaaggattggctcccgctccgggtgaccggcctcagctggacgggtcagactttcaacaatgtacggagggttagctaatgggttcggttaatacgatcctgcaagcgaacaacaccacccgcatcgctcgtgcgaactaccgtgcagccgttgcgcagaccgacaacacgaaccggagcgaggtcgccaagactggcttctcggatttcatgcggtccctgaagaacaacgcccagctggacgccgccgccaaggagtacaactccaacatggaggcgctgtccgaggagctgcgtgcacgccaaggggctgggcttaactcccagctccaactggcgaatgctcgcggtgcgttgcaggcgcaggccggtgctgtcggtgtcggcggctcgtccgcagacctgatggattccatggtgcgcttgcaagcggagatggacaaggagacgcaggacaacgcggtggcactactcgcctctcgcggtgcatcgcagacggcgcaggtgatggcgcgtgcgtggcacgggatggacatgagccgcacgttcggccagttcgactacgcgcagcatatcgagccgaaggcaatgaagcgtcgcttgggcaagctgatcggcgtggccgtggctacctacttcggcgggccgatggcaggcgaggccgtggcggacttcgcagtcggcacgtggcaggcggacaacggcaacttccaaggtatgtcgcagtccttcaacaacgcagcacagaacgggttgcaggcgtggcagcagtccaacgagcgcggcggcaagtcgtgggcgtctactaccttcgggtacaacgacggcaccggcaagcagtccgtgacaggggcgaaggtcaccggcaacttcggcaacaactacgacaacttctccaccactacgtccggcctcggctggttcgatagcggaagcggaggcaactcaggaggtgcatggtaatggctgacatcggcacggttaccttcaacacgcagtccgcattgcagggtggcatcaacgccacccccgcactgtcgggcaacaccagcatccaaggcgctggtgtgaatcaggtcggccccgttcgctcggggtcggattggttcgagagcactggcggtatgacgatgccggacagcaacctgcccgagttcttgcaagaactggcctcgccgaacaccgccaagctcaagcagcagcagatgtgggacggcttcgttgccgcccgcgcgggcaagaccatggacgagatcgctgcgaccgagccgtggtacaagaagatcttcggcgacaccaactacgagatcggtgcgagcatgtacaacacgctctcgcaggtcaacgagatggagagcgacctgctgcggcgcatgccggagttgcgtcagctgccgcccgaggcgatggcgaaggagttcaacgaactcgccactgcccggatgaccggcaacggtttcgcggacacggtgttgcagaagaccttcatggatcgtgcgggttcgctgatggacctgcacacgaaggagcgcacggcgtggcagcagcaggagctggtgaaggcgcagtacgctgcgaactcgtcggcgtccaccggcttcaacgaactggcgaagcgcacggcgatgctcggcaccaaccgtcccatggacgagaaggccaccgaggcgttgacccaggcgcagctgtcgctgctcgacggcctgtcgccctcgcgctaccagacggacgagtcctacaagtccgcgatcacttccttctaccgtggcgctgcggatcgaggcgagttccacacgctgaagttcctcaacagcaagggcgtgctgaacgccatcgacccggacgggcagctggggatccagcagtacgtgaagcaggcgcaggatcggtaccgcgcggactggctcgacgccaacccggagcaggccgagaagatggcgctcgtctccatgtacgcatccgagggcatcggtgccaagccgtcccaggcgatgatcgaggaaatgaactccacctacgccgctgagactggcagcgacgcaccgctctactcgggcacgcagctcgcctcgatcatggcacagtccgcaggcgcacacatccgcgcccaggaagccgtcatcaaccagcgcaacgcggcggccaaggctgcactgacggaccagcagaagttggctgctcaggaggaggacatccgtggtggcatcgaggcgttcaagcgcggcacctacgcgcagacgatcaacattcccggcgtggacaaggagctgatcgaagccaacacggtccaggcgtggaacgacacgatggcgaagaacccgaaggtcgccatgtcgcagctggtgtggaacgccaacaccggacgcggcgccgtgctcaagggcgtggccgaccagttccagaccacggcgcgtgccgtgctgcgcgaccagccgaacacggcagcggctgcgctgtaccagcagtggaaggaacttaagcagaccaccgccgcacgcatcggcactgacgggcagcctgtgcagggccgactgaccggtgcgactaccgccgcgctgtacttcggagatagcgtcaacacgttcttcaacaagctgcaagcgttggagaatggcggcgtgaacttcgagcttgcctacgaggtggcccgtggcgaaatcaccaccgacgatcccacgaagttcgacgcggacagccgtaaggaatccgaggctactcaggctcgtgttactcaggctatcgcaaagctcaaccccaagtacctcggtatgttcggcaacaagcttggcgactctggccgcgctgcgtatgctcgcgccatcgtccgctcggtcaccgacaccggaggtctgctggacacttctgcggaaggcttgcaggctgcggctactcacgccaagctggcctacggtctggaagacgcgggcaagtacgcatgggagaacgggcgtgacgacgagggccgagtgatcggcggcgtcggtgcgtggctgggcttcatggacacgaaggagacgggaccggctatcgagaaggctatcgacgcagcactgcgccgggtcaacatcgagccgaccaccggcctgaaggccgacgtgttccgcatgaaggacagcgagactggcgagcccgtgctgtacgtcaacgctgttggcgagaagggctggaaggttgtgccggtgtacgggcgcgacatcaaggccgagtacgagaagcacacgaaggagcagcgtaagttgcaggccccggtaccgcagggctacgttcgcatgaacgacggtacgattcagcagagcatttccatccaacccaaactgtaaggagatagacaatggcactcgatctttcggggctgacccaagaccagcagattgccaaggctgccgcttatgcgggagtgccggagtccgtcgtacgtggtcagtggcgagtagagtccggcaacgggcgtgccgccaaggacgcggacggtattatccgcagcaaggcaggtgcgcggggtgacttccaagtcatgcccaccacgcaggcaacgtgggaagcgcgcaacggtcgcaagtacgacatgcgcaacttccaagacagcatcgagctgtacgccgacatcatgcgcgagaacatgcagctcgccaagggcgacgtaaccaaggctctgcgcatctaccagggcggcaccaacccgaagaactggggacaggagaacgcggcctatgcacccagcgtgctgggcggcgcctcggctcctgctgtgtcggcacagccgcgcagcctgagcaccacacaggcggacctcaacgctgcgtggcagggcaacccgaacatgcgcgaccgcacgtggtccggtgcgtccatcccggatgcatggaccggcgctcccatcgaaggccgcaacgccctggcgtcggctgcgaaggaacacatcggcaagattcgtgcgggcatcgccgagctgtcgatggggcagatcgcgcaggaaggtggcaccgccgagcaggccgtgggccgggcgcaggccgtccgtgcatcggatcaggttgtgccgtggtgggtgcgccaggaagtggactcgctgaacaccggcgcccgcaaggcgctgctggatcagaccgagcaagcactcgcacaggatcgtgcggacgaagagctgcgcaactcgctgacgttcctcgacaagtggggcgcggcgttcgatagcggcatcggtgctgcgatcagcaaccagtttgcacgcgaagaccagaacatccccgagggctggaagtacgacccgaaggaatgggagaagccgtggatgactgccgacgaactggaagacatccgcgacgcagcgtactcgccgaacgagttggcttacgtggccgaccggcagttcatgcggcgccactccatgcggatcaaggatcagcagaccggctggtcgagcttcggctacgacctcgtggcgggattcaccgatccgggcaactgggctatcggcggcgtcaccgctgcgggtgccaaggtgctgggcgttggttctgctgcgctggtggccgagggccgggtgggtgcgtcgctcgcatctgccgctgcggagaacgcggtcggttccgtcatcacggacgccgcactggtgagcctgggcgagcgccgcaacttcgcggacttcatgaccgacgcagcattcgcaaccaccatcggcaccgcgatgcacattccgggcgtgcgctcggcttcgcagattcgggacaaggccgccatcgacctgtccgcaggcaacgctgccgcttacggcgaagcgtggtcggctgacctgaaggcgcgcgctgtgtccgagctgggagagaacgcaaacccggtgatcatcaacaaccgagtccaccagcttgcgaagcaggaggccgtggactggctgcgcgccggtatggctgacgtgcctgacgacttccgcgtcttcgcacgccccgacgtgcaggagacgaccaccaccgcaggtaccaccggtacgctcgcgcgtgacgtggacaacgtggactccaccaccggccggtacaacgacaccgttggtgggcgggcggatcagcacgacccgctgttggagcgtgcatggaaagctgccggtatccagggcggcaaggtggacggcgtactgaagtacctcgaatccaacgcatccatcccggaggacatgcgggctatcgccaacgcgctgaagcgtggcggccgtctcgacagcgtcaagatcgtgccggagcaggagctggacaagtggttcgctggtgccaaccccggccccggcatgaagatcgcaggcgggtacaacccgagcctggatgccatggcgatgcggaactacaacccggagacggtgctgcacgagatgctgcacgccgctactctgcgtgagctgcgcagcaacactgcgttcgggcaggagatgcaagacctcctgacgcacatcaacagcagcctcgacagcgtggactctacgctgaccaccgccgcaatggagggccgtgtcaaccagccgcaggcgggattcctcgccaatacggacgagctgatttcctacggcctcacgaaccgcgctgtgcaggcggtgctgcgtcagatgcctgcgccaggaaacacccgaccgaatgcgtgggagtggctgaaggacaagatcgcgcgagtgatgggcctgaagaaccaggagtccgcgctcgaacggctgatgtctgtggtgggcgagaacgttggcgcggaggttcgggacacgcaggtgcagacccgccagactcgcggtatgctcgccaactcgatcttcaaatcgaaccgcgagcgcaaggcgttctaccagcgcacgggtctggacaagtccgtgagcgacgacgcgatgcgcgtgcaggttgctgaggtcatggctcgctccgagcgattcagtgcgaagtacggtatcgacgcagccaagctgtccaccatcatgcagcgcttcgggctggaagctacgagcacgaccctgatgtcgtcccagtcgccggtcgcgcgtatgctcgcggtcaccctgttggagaacccggagggtgcggcaggccgacacagcacggcggcgatggatcggcacggccggttcgagtcgttcatgggtacgcggccgcgtcagtgggaagcggcctaccggctgtggcgtgctgaggtgcgcggcatcggtgcggtcaaggacttcgccacgggctggaaggcacgtgcggacttcgagtacgcagtgaagctgtaccgcgagacccgcttcaacggcggtgacatcccggacgcgcacgaggcagtgaaggcgatggcccgagagatcgaccgtggctacaaccgcatggcggcagagcagcgcgcggccggtacggtgggcgcacagcgtctgccggaagaagacgtggagggctacgagtcccgcacgtggctgggcggcagcatcgctgctgctggtccggttcgccgcgagggtatccgccaggcgatgcgcgagcagttcgaggtgatgggtgagctgtacggggacgagttcctcgacaagttcgctaccaagtacctggagcgtatcgagcgcaaggctgcgggcatcatcgaagcgccgggtcaggtcttctcggagtcgcaggcggacacgctgcgtgacactctgcgggcgatgtcgctcaacgaggaggagatccagaaggtgatgggcaagtacagccgtggcggtgcgaagcacaccaagtcgcgtatcgacctggacgtgaccaagcagtacgaagacgccgatggcaagttccgtctgatggactacctcgacaaccgagtgatggacaactaccgcaagtacgcgggccgggttgctggtgacatcgccctggcgaagcacggcatcctcggcgacgcaggcatcaacgtggcgcgcgaagcaatgcgcctgaccggtgccaccgacgtggagctgaaggcgttcgagcaggtgatgtcggagttcctcggccgccctgtgggcaatggcgatccgaccgttctggcgaatgcgcgactgctaacctcggctatccagctgggcggcgcgggcatcaatcaggcggcggagtacagcaatggcctcgcggccgtgggtgctgctggtgtggctgacgcaatccgtatcgctccccgcatgcgtggcgaaatcatgcgcatcctgaagggcgaggagagtggcaaccagatcctcgacggcttcgagttcatcagcggtcggggcttcggcctcgccggttacgacctgcacatgttcaactcgctggacacgcaggcgtcgatgtacggcagcgagcgcgcaggcttcctcacctcgttggtgcagaaggcagcgcacacgaaccgcatcctctcggggcagcgggctgtgctcgccgtgcagcagcgtggcttcgcggaagtgctgatcgccaagggcgtgaagttccttcgcgacggtgccgaggctgacaccgccctgaaggacatgggcatcgacgacaacctgctgaaccgcctgcgggcgacgcaggacaaggtcgtgcgctggggcgcggacggcaagctggaagcagtggacccgcgcaacgtcgatggactggcggatcggcaggcatggctggcgttctacaacgcgatcaaccgtggcacctcgcagattcttcaggacaccttcatcggcgagacgggaaagtgggcgcacaacggctggctgaagatgctgttccagcaccgcacgttctcgctggtcgcgcagcagaagcagctgggccggtacgtgggcaactacggtgcgtggcagactgcgggcctgatcgctgcggcgatggccgtggctgcgccgctgcaagccctgcgcgtgctgtcccgtgtggccctgatgaacgatcaggagcgcgaggaggccatcgaccagaacatcctgtcgcccctggcgctgggcaaggccacgctgaactacgtgtcggcgacgggcatgctcaacgacgtgctggacgttggcaccggtgtggccggcgggtggtacgaatacgccaccgacacccagggtccgacgtggctgaagcagttggccggcgggcagttcggtaaccgcaaggaggtgatcggcgggcagttcgcgccgtctctaggcgtcatcaacgacttcgcccagggcatcgccggcaagccggagaacctggcggacgtcatccccggcggtcgcctgcccatggtgatcccgctgctgaagggcgcggccagccagtggaaggaggagtgagaatcagggccaaggacggcccacccttttggtacacctacagctaataggaggcagcatggcagttccagacccgcagctgcgctacgcgacagacgtgttcgacgccgatggcgtgaccactgactggcagatcagctttaccggtggctacatcaacccgtcccacgtgtacgccatgagcggactgttggacgaagagacccagctgctgaccgatcggaccccgcacaccgtggaagtcctgagcgaggacgatgacgctagtaccgtccgagtctcgcctgccgtcgccgctgggcgtaagctctacatctaccgcagcactccggtgcagcagatgctcgttgactacgttaacggtagcatcatcagcaagaccaaccttaacctcagcaacgaccagctcctgaagatcatccaggaaatgttcgactcgctcaacatcgccacccttagcatcgaccagcaggtcggcgtgatcgtggacctgaacgagatcatccagaacatctacaagcaggtcaccgagttgctggccgctggcggcatcgtgtctgtcaccccgcgcgtctggtccggttcatggaccggcgaccaggccggcgacaccgacttcgacatggtgggcgcggacgtgtccggcgccggcttctacgacgtgtacgtcaacggcatcggcatgcagccggacgtggactatcaggtcaccctggcggacggtaccgatcccagcttcatccgcttcgccacggttcccgccgaggggagcatctggttcgccgtgcttcgtggttacgccaagccctacaccgggccgccgccgatcaccgctgcgagccttcgggtgccgatcatcccggcagcaggcccgacctactacgccgacaaggctaccgagtacggactcgtgcgctgcacgtatgccggaggctgcaccgtcaacatcaacctgatccccacagtgggcaacggtgagacgaagctcgcccctggcagctacttcagcgtccagcagaaggcgggtccggtggtcatcaccggcgatgcgggtgtgaccctggaagtaccggtcggatgcaccgccgcaactcgcggcaccaactccgtcgtcacggcaacgtgcatcgacggcgacaccaacacgtggttgctttcgggcgacttggctaaggagtaagcatggctaatcacttcaggctgtacggccgaccgctgatggcggacgaggttgtagatggcctgtcggtgacgggcgtgctggaagggtacacggcgggcgaggcttacacgtctcgcctgtccatcaacaacccagtcggccgctgcaccgtggaggtcatcgaatcgacgctccctgcgggcgcggtagtccgagtggacaacatcaccaaggaagtcgtcgtcaagtgggcggctttcactgaagtcctggacgaggaaaccctcgtgcctaacggcgacttcgaggcgggcgacgacggaacgtgggtgcctggcggcgcggagaatggcgagggctggtcgattggcactggctccggctacgacaccgacggcggcgcatacagcgcgcgcttcgccaacatcaagacgagcggcagcgacctgctcaacccgctgattcccgccaaggtcaacgactacatccgctgcaccgccgaagtcaaccagggcgcaagctcctcgggtaaggcaggtgcacgtgtgtcgatcatctaccggagggaggatgggacggagctgcaacgcaactccggcaacctcgtgaagtccggcagcggcggcgcttggcaccagtcggtcgccgagggagccgcacccaaggacacgaagtacgtgcagattatgctgtctgcattccgcagcaagcagaacaagccgctgtgggtggacaacgtcaagtggaaccacaagtacgtgctggggcagaacgacgacagttcctacttcctgagcatcaaggtcaccgacgggttgaaccgcgtggcctactggtccggccgtatcgaggagcagggcatctacgttacgtcgaagctctacagcttctaccagacggagtctttcctcggcaccagtgggttcgccgggtactccaacagggacatgcagactcccttggaacagttcctctgcggctcatccttcgttggctgggaaattcgcagctcgcgtatagaggtggacgccggggcagaatcgttctcctgcaccagctcgctggtcggctgggagattaagagcatccgaaaggagtacgctgtagaaacccccgagtctgttcgtgttcagtcctcgttccattccttcaacctgaagcagcatccggtagtgaaccagccgcccgacgcggccgcacttgtccggtctggcttcgtctcatggagtttcgcatgatccaaaacaagctcggagttgccgggttcttcaccattagcaaaggcaagtcgctcgactcgctgaagacggtggcggactggcaacagaacctcattaccaacagcggcatggatgcactcggcggcaccggctacccgatcagcctctacgaaatgatcagctacctcgcagttggtagcggtagcgcgactccggcgttctccgacaccgcgctgggtgcggaagttgcgcaggtcggttacactacccaaaacaacggcggcactaccaccgcaccgtactatgcgtacgcccggatgcagttccagttcgcggcaggtacggcaaccggcgtgctctccgagctgggtgctaagcgctacaacaacagcaccggcacgtacatcctcaccacccacgcgcttattcgggactcgggtggtagccccaccaccatcaccgtgctcgcagacgagatcctcgtggtcacctacgagcttcgcctttacgtggacaccacaccggtggttaccacccagacgatcaagggcgtaagcaccactgtgacctgcaagcctatcgcgcttagcaccggcgccatccagggagccggcgccgtcgcttggaccaactacgtgtggggttgctactacttcatcggcggcaccggagacggtactggcgcaatcaccgacgccacccctccggggaccaacgtcagctactcggatttgtctacccagcatatcgactatgtgcccggtacttactaccgcgacgtcgtctgtcggctctcgatcaacaacgttccggatggccctatcaccgcagcgatggggatgtcagggtgcatcccgttccaggtcgggttcagtccgggcgtcaccaagaccggatcggaaacggccaacctgcgcatgcgggtttcgtggagccggtacacgccatgatccctactgtctcccaaagcatccaacgtggtgactgggtagagcagcagaatcggcgcacccgcccgctcatcgacttcgagcagggcgggctggtactcaacgcatcagtggataacctccaagctgcgctgtggaccgccgagagtgacggcagcagcgtcgtcgtttaccgcgacggcgttgccccggtcaccgtgctgacagactccggcatcacgcagatcgcactggcattcgaccagaccatgcggccgcacatcgcctacatggcgggtggcgcctgcaagttctactggtacgacacggtggcaggctcgatgcagaccatggtgatccccggcgcaaccacgccgcgcctgtgcctggacgagaagcgagcgatgttctccactcagagcgacgtgctactgtcgtacaagaacgggagcaacctgtgcgtccgcgcgcagcgagagcgcttcgcaaccgaacacgtgatcgccaccggaatccccggtgagctagtcgcggttggcatgaacaacgtcaaccgcctgcaatggaaactcgtcggcaaccccgacgactggccctaaacctacaggagaacagcatgaccccgccgagtgtggtcaatgaggtcgtccgaacctcgccgcttacgctcggcgcggtctacctcaacttcatcagcacgtatggtgctgccatcgtaactacgctcgccatcatgtacgctgtcgctcagttctactggcgcgcgcgcgagcaccgcaagatcatgggagggaatgatgtcgaacccagcaagtgagggcgcgctcggcgcactccacgaactcgttgccgtggtactgaaggagcgcctcgccaacggcgagctgtgcaccgcagcggacatcaatgccgcgatcaagttcctgaaggacaacaacatcacggctacgcgcgaggccaacaaggcgctcggcgaactggaagacgaactcggcaagcactcgctgccgcaggcggacgatgacgagttgcagagagcactcagcaacatcgtcaagtttccggggagcgtagccaatgcgtgaatcagccgaagcggcagacatccgtcgccgcaagttggagctgttgcagaaccactaccggcacttcgccaccttcatgcgagacatcatgaaggtgctggggttcgatccgacgtggatgcagtacgacatcgccaactacatgcagtacggcccgcacctcgcaatggtgcaggcacagcgaggcgaggcgaagtctaccatcgccgcgatctacgccgtcttctgcttgatccacgatcccacccaccgcgtgctgatcgtatcggcaggcggtacccaggcatccgagatcgctacgctgatccagcgtatcatcctcacggtgcccacgttggagtgcatccgaccggacaagaactccggcgaccgcaccagcgttgacgcattcgacgtgcaccactcgctgaagggcatcgacaagtccccgagcgtggcgtgtatcggcgtcaccggcaacctgccgggtaagcgagcggacctgctgatcgccgacgacgtggagtccaacaagaacagccgcaccgcagccaaccgcgagctgctgctgaccatcacgttggagttctccgctatctgcaccggcaagcccggcactccggggcgcatcctgtacctcggcacgccgcagaccggcgactccatctacaacaccctgcctgggcgcggctacgacgtgcgcatctggcccggccgctacccgaccccggcgcagcgcgagcactacggcccgcatctggcgccggctatcgtgcagcgcctggaggccgaccccatgttggcgttcggcggcgggccgatgggcgacgaggggcagtgcaccgacgagctgttggccggagagcagaagcaccagtccgaactgcggcagcgtggaccgtccagctaccagttgaactacatgctcaacacgcggctcatggatgcgcttcgcttcccgctgaagaccgagaacctcgtggtcatccccggcggtggcgaccgctacccgctgacgatcacgcgcggcctgagcaatgctcaccagcgcgcgttccagtccagcggctacggcttcgtcatgatgatgcctcacgagatgagcaccgagactgcgcccttgcagggcgtgcacatgcagatcgacccggcgggtggtggtgccaacggagacgaaacggcgttcgccgtgaccgccttcctgaactccaccgtgtacgtcctggccgtgggcgctgtgcccggcggctatgacggtgacggcctgctcgaactccgccgcatcgcggtgaagtacaagccgaacgtcatcaacatcgaaaagaacatgggctacggtgcgttcgccaaggtgttcctgcccgtgctgcgagaagaccgcggtaccgagacgggatacaagggcgacatccgcgaggagttcgtgaccggcaacaaggaagcccgcatcatcggcacgctcgaacctgtcatggctcgtggctcgctggtcatgctggaatccgtggttgagatggatcacgagtacacccagcgctacgcatccagcggcaagcgccaggtctacagcctgttccaccagatggcgaagatcacacagcagaagggcagcatcgcacacgatgaccgcctcgacgcactggaaggcagtgtgcgccactgggttgcgcagcttgcactggaccagaacaaggccatcgtcaagcagcagcagcgagagttccaagactggatcaacgatccgaccggcatgaaggcagcgacccgaaagagtccgctccaacgtggccgtccatccctactcgaccgctaccggaggtaatgtggcgaacaagcttatcaacatggcagtacggaccagcacttacggtgctgagctactcactgccgaaaactccgccgccgcacgagtgctcctcggtgttaccggcggaggtggcggcggcgaggtagcctctgtcaacgggcaagttggtgctgtggtactggactacgcggatgttggagcagcctctgctgcccaaggcgcgaaggccgacacagctttgcagccgggtgacgcagttggcgcgatcagtagcgtcaatggcaagaccggcactgtggtgctcaccgccacagacgtgggtgcggccaccgccgcccagggtgccaaggcggacactgccctacagcccggagacatcccagctcagtccgtaaccagcgtcaacggaaagaccggtgcggtcaacctcgtcccggccgacctgggtgccgctactgctacgcagggctcgaaggcagacagcgccgtgcagcctggacagctcgcaacggttgctacatccggcagctacaacagcctgacgaacttgcccaccttgggaactgccgcttcgcaaagcgcggcagctttcgcgagtgctgctcaaggtgctgctgctgacgcggcacttcccgcagcactggttcccaccggacttgtcgttgggttgtccttgaagtacgcgagcgcgactacggttacggtcacagcggggtcggcttacatcccgggaacagggttggtgtctctcgcatccgactccaccatctctcccggactggcagccagtgtgtggcgacatgtctaccttactccttccgggtcggtcgaggcgtctgctacagcaccggctgcgccgtatgctggtaccgctcgtactaagtctggcgacaccacccggagatacctgggtagcatcaagaccgacagctcgggcaacatcgtaaagttcttgcacaacgccgcaaccggtgcggtgaagtacctttacgacatcaacacggcgcccttgtatgtcctgtctgccggggtggcaacgagtaacaccgttgtctcttgcgcagcagccgtccctctaacctcccgcgtaatgtatgcattcgcagaaaacgtggcagcctcgggtgctttcgcctacatagctaacccggatgcggggcctgctggtccgaccatgatcttggagtttctgcgcgccaacttcatcatgttcggagagctggtgctagactcttcccagcaattcaactactcgcgtaacactgctgacaccggcggcctctccgtctggtgcacaggctacacatacgaacgataaggagcaaccatgctgaagtccgacttcaccagcaactacaccggcctgtacggccgcggcaactacctgcaccgcgaactgctcgccctcgtggagcacgcggagaagcaccccgcaaccgccgggcagctgctcgcccagttccagaaggactcgacccaggtgctcaacgccctgatcgcggccggtgcgcgcacgcagtcctcgggcccgaactccggcccgcacaccccggtcgatctggacccggacgacaatccgctggacccataggagcaaccatgaaccagcagcagagcaacaaggggctgttcggcctcgtcggtggcatcttcatcggcatctcggcaacgctgctgtcattcacccagggccacgaaggggtacgctacaaggcgtacctcgacaccggccgggtgccgaccatctgctacggccatacggacggcgtagtgatgggcatgacggcaacggagcaacagtgcgacaagtggctgatcgaggatcttcagatcgcccagaagggagtgcgcaagcacctgaaggttcccgttaaccgcaaccagatcgacgcctacacggacttcgtgttcaacgtgggcgagccagcgttcgcgaacagcaccatgctccgcaaggcgaacgcaggggaccgcgaaggtagctgcaaggagttcctccgctgggtctacgtcggtaagctcaactgccgactgtccagtagccggtgctccggcatccctaagcgacgcgacgcagagttcgccctctgcatgcgccccaacaacgaggtgatccaaccatggaaaccccaagccaagtaatcgcgcggcttagcggtaaggctatcggcctgctgctggtcgtgaccctgttcgtgtgctccggtctgtacgtctacggcctgcaacgcaaggtggagaagctggaaactgcccaagtcggcacgaccgctaccgccaaggcggctcagacccaggccaccgggtacgcaacctacatcaaagagaaggaggacgtgcgtgtacgcactgaagaagctctcgacgccgttcccgagtaccgtgacggcactgttcctgctgatgtcgctgacctcctgcgcgaacctgccggttcccagtgatgatctcctgaaggactgccatatcacctacctcggtggtgagcgtggctcctcttccagccaggacaaggtggtaaagctggcacaagaccgccggatggacaccgttctgtgcaacaaggacaaggctgcgctgcgtgcgtggaaggccgaggtgtgtggcgtcggcaagcgccggtgtgtgcaggacaagtgacatgacgactatcgcatgggacgggacctacgtctacagcgacagccaagtgacctacggtagtgctaagggcaaggcggttaagatattccgccttgtctctcccgatggtccagttgttgctgcgttctgcggtgagcggaacatcatccacgactgcaaactagcaatcgaagcaggccgcagtctagacaagctcgtcggtaaggagtcatccgtgctggttgtcggtaaggacgcagcgttcctgacctctgagggtaagacctggagggtggatgcgcctctcttcatgggcagcggcatggacttcgccgaaggagcctacgaaatctgcaaggatgcccgcaaggcggtcgaggttgcgtgtcgtaaggacttgtacagtagcggaccgatcgctagggtcaaggctccgaagtaagccggaccaaaatttgcttcggaaatgcgcgggggtcactccaataagagctcccgcgcgtgcccccgtacgccctcgcgttacgcgcctgggtgtgcgtgtgggcgtgtgcctgcgtgctcgtgcctgggcacgggtgcctgcgcctgcggcgcgtgtgcgcgcctgtgcgcctcacctgcgggcgcgagacgatgcacgtgggtgtgtgcctgtgtgtgcctgcgcggggcgtgtgcgcgtgcctgggcggccgtgtgtgggtgtgtgcgtgtgtgggcgcgtgggtgtgcctgggcgggtgcgcgtgtgtgggcgcctgcctgccttggctgaatggttaacaattctctcgccgtgaggtgttgacgtggccgcctgggtgtggtccaatggcctcactgggcgccgggaagggccgcaggagggccgcaaggggctggacaggtacacacctaccgggtaccatgcgaaccgctgctgtaggcgtgtgtgggccatctgtatcgtttcgcctcgtttcgacttggtgtgatcgacggttcggccttttggtacacctacagctgagaggtccgatgccaagctgaacgccgacgtatcggtaccctgtcgggatcacagtaagctactgctaggctaaggttgacgcttgctgacgcaagcagtagacacagccatgcaatgtaggtaagctgaccgggagttgagtgaccaagctattgagtaagatggtgggaagccctcgggccgacgacaagagcaaccatcctatagctatctgagtgtgatgcgatgagctaacacgatgacacttgacagtaagcccacagtgagctatgatgcgggccaggtggtagagccaacggtaaggcggctggatcaccagtaaggagcggaccaccggctatgatgaggtgggatggtggcgacaggacgcccagcgggttagagacccggcagtcaagataggcaaccatgccgaggcttgacaagacagcaccacggtgctagtatgtgagtcacctagtgagcttgtcaggtgtgtctgcccgaacatctatcggaaacggcagtgaaagctatccgagcacttgacaaggtcacccaggtgtgcaacactggcaacacgctccgaggagcaccggcactggaccggagtaagactaccgctaacgggtagggtgtaacgtgaagcccttatgggtggaacgccaagctgcaacgtagcactagcggataaccggatgaactagggcttcaaaatcctactgaatccaccagttagctttcttgcgaaagcaagaggactagcaacactggtgccgctttacctagagctaacgtctagggcctgcatctgccgtgagagtcggccacgcaggtaacctactgccaaggtaggaagccggtcataagcgggtggtgagcctgctatcgaggggaatacccttcgtttcgtgaaaggttctgcatcgcccacggtgacaatggcactgctagccggagtagggttgacagcccgaagggctagcagattgatgcgctcta

SEQ ID NO: 29 - DNA, 44829 bp, unidentified
  misc_feature 1..44829: note = the genomic sequence of a bacteriophage
  source 1..44829: mol_type = unassigned DNA
tatgtgagtcacctagtgagcttgtcaggtgtgtctgcccgaacatctatcggaaacggcagtgaaagctatccgagcacttgacaaggtcacccaggtgtgcaacactggcaacacgctccgaggagcaccggcactggaccggagtaagactaccgctaacgggtagggtgtaacgtgaagcccttatgggtggaacgccaagctgcaacgtagcactagcggataaccggatgaactagggcttcaaaatcctactgaatccaccagttagctttcttgcgaaagcaagaggactagcaacactggtgccgctttacctagagctaacgtctagggcctgcatctgccgtgagagtcggccacgcaggtaacctactgccaaggtaggaagccggtcataagcgggtggtgagcctgctatcgaggggaatacccttcgtttcgtgaaaggttctgcatcgcccacggtgacaatggcactgctagccggagtagggttgacagcccgaagggctagcagattgatgcgctctagatccgactgagccgccgcacgatgatcctagccacccggttacggagctacactctttcgtgaaggccgcagtgtctgtgtgatgactccacacggaaccttcgggagtccctagagcgcatcaatctgttagttttttcccacagtgccaatggaggcacaacatgcacggttcgatcaacgccaatctcgaacgcacccgcaccaagcgccgcttttgccagttcaccaagactgcgagcgtcgttgacctgcgcaccaccgaatacgaccgcaagctggctgagcgcaagcgccaggccgagcggtacgaagcccgacacggaaccgctggaaagcgatctgtgtttgtcgttgagggtaacagcgggaccgcaagggcgaaccacgccgctgatcggagggcttacctgtgatccgcatacgcttctccgaccggttcccgtattcggcgtttacgtcgtggttcaatgcgcagcagcggcacggtgctgctgtgtccgacctcgttcacgacggcggatgctaccgctacaccatccgactcccgtaatgcaagctactagtccttcgcaagaggggctagtgtcgtgcaatcggcacggacccacctgaagggaaccaccatggacatcatcaccgggagcgctgacatcaagcgcgccatcaagtcgatcaacacggcccgcaccaagctggtcgatcagattcagcaggccgccgtagcggtcatcaaccacgcacatatccacggcgacgttacgctcgcttccgatctgtgtctcgccgtgggcaacggcatgaagcacgaagccctgcgtctgtatctgtccgaattcggcccgatggcgcccaacgacgacaaggagacgaaggcgagcgcgccgatgaagttcgccaagagtaagcgtgtggagggcgaggccctggccgacatgttggaacgtgccgccgcgaaggcgtggtgggacttcaagaccgaaaagcccgccgaggcgttctcgttcgccgctgacctgcacaagctgcttggccgcctggaaaaggccaccgagggcggctacgtcccgaccgacgaggagcaggccgtcatcaacgctgctcgcgccgtcccgaagcccaccaagaaggtgcaggcgtaatgctgcccggcacccgcgtcatcggagccggtgtgcgtgggtgccactgtctgaccgagggcaaggaatacacggtagaggactttcagcccgcctacaccgacccgaccagttcgagcggcttcacgtggcctgcatacgtgggagtcatcaacgacgaaggccggattggttactaccacacccacagattcaaggagaaatagcatggcgatcagttacacaaaccggggaaacaacgccgtaagcgcccgtgatctggttccgggcagatactaccgggagaaacacgacgcacgggacgagccgatcatctatatcgcaaccgatgaagggtgcgtggttgcgctggatggcacccagttcaaagtgaacccgctggaatacatcgaggtgcaggtggacgtttacgtgggagacgacgtatgaacgtcgataccgacatctgcatcaccatgccccgcgaggaagccgagctgcttcgctcggcgctgcacatcgccacccgcctggcctcgaaccttccctcagggtacggcaatcgcaagctggccgacgagttcggccgactgcatgcctacctgcgggatgcggacgtggaaatcctgaccggcaccgtgcagttcagcgagaagatcctcgatgcagtgagccgctatgtcatggccaacctcggccggggcatgcctctgcacgtaatctcgggccgcccgagcggcgggaagtccgcactggcagacaccctgctccgcgaacacctgcacacgctgcccccgcaattcgcggtgaacgccgacttcagcaagctggaagaacgggtggccgcgtgcctcaaccagcagcctttcgagttcaagcgcccgacaacgggccgcgagcgtctttcggacacgccgatgccggacaacctgccccgctttggcaagctgtgggacgtactctcggaaggcaacgcattcccaggggtgactgtcgccccgaagaagaagggctggatcgtgcagttctactgcgagacgaaaggcactggctggacgcgagtgctcggcgggatgtcggcggcaaccggagtctacgagtcacgtaacgaggcgtaccgccagatgcgggcacgcagcaagcacagcatgtgcccgctgatccgctatcgtgtggttccggaaggcacggcgaacggcgaggagcgggaccgcgggttctacaccgtggaatactacaccaggcatgggacagggccgcgcgcacctcgcggttgggccacctctggcatgccgggcatgaacggcgtcttccggaccgccacggctgcgcaagatgcaatcgataagcgcgtcagactgctcggcgagaggattcgcaagcgttaccgcgtgaagtggcacccaaaccacgcgtgatctaccgctatgccttctaacgagggcgtagctttggaaccacgcccaacaggagggcataagcaatgatccccgtaacttacaagcgcatccatagcggcaagcgcaagccgatccagctgtgcgagaagcctcgccagtggaaagagtacgtgacctatgagcacagcgtggagcgctggtatgcgtgaggtcagcctgcgccttgtggtgaaggtgctgccgctcgttaccgtggaaggtgccgctgccggggattatatcctcggcggataccacaccagccacgaggcatgcgagcaggccatcgcacaccaccgcctgcaccacgagaaggtgcccaccctctacaccatagaggaaatagaaatcccacccgtcaacgaggagaactaccatgcgtaagctgtacttcatcacgtccatcccggccaccgcaaaggatggcgtcatcactggcgtagtcgccaaccactcgggccgtgccgccacagccgaggaagcgaccgcgctggtcgagttcctgcgggagaagggtgcgtcgcagtccctggtggatgcgctgcgcgacggcacctatccgaatccggtgtcggtctttgaccggcgcggcgccgcacgtgccgaggctgctctgctgaattcgttcggtggcctgttcaactggtccgtcatcgcgctgggcgagagcatccgcaagccggtgcgcaagccgctgggttggcgcatcaagttcgacggcggctgcgtcagttgcttcaacagcactgactacggcgctacggtgcgcatcgacggcaacgaggagaaccatagcaaatacaacctgctgttcccgacccgcgaggcggcgcgccacgccctggacaccgaggtcggcgaggactgcaagcgcagccgccgtgacccgtggggctactacgcggaggcggtgtatgcgtaagctctggctgcgcatcctgatcctgctgtactggatcgttggccgtggcccttgggttgtcatcggacaatactacgacgatgaaggtaggctgtgccggttccgcaccggcccggcgtacatggggtgcacgctgacgttcgatgacatcgacgacgccaacaactactgcgcccggcgcaactggcaggcagacaccgacccactcggcaccacgtactacgtgtggcacgagatggagttcaacaacttcggacacaggagaaagtgacaatgggattcctcgacaagatcaagaagggcgcgcagtacatcaaggacaagttgaccaacgccatcaagcccgagcgtgacgacgacgacaccacgcctccgcctgcggtgaacacggcgaactacctgcacgtaagcgtgccgctggttcccatcgacaacccgatcctccgcaagatgctggggcaggattacttcccggtcgataaggggcagggtcagacccgcaacatcggcaacaaccacctgaagagcgtggccgaccacctcgggcacaacaacaagcagcgccgcaagctccgctctcgcatgaagcgccgcgccgccgagctgcgtgccggtgcgccgctggtgggtgcagcatgagccgggtgctgggtagttgggtcgaggtggtagtgccgcaatcctgcgctcacctcgaagccgtaacggattcgctggacgctgcggtgcaggctgtcggtggctgtactatcaccgagcagaccgggtactacaagcgcgaggacggtacggtggactacgagaacgtgttcaccgcgcgttacgacttcgacatcgacagtccgaacctggacgccatgctgtcggctgtgcgtggagtggtgcaggcgctgctcgaagcgggtgaggagtcggtgctgcgccgccggtactacgccccgagccgatccaccccgttcgccaaggcaccgggctacaagtccgagctgatcttcaagtaaatctcgcactgatttgcgtgccggaagggaccacgttacggaccaccaatcaacccgtcaatgaaaggagatacacaacatgtcgaacgagaacaccaacgagcagaccaccctcagccactacgaagcgaagcgcgccgagctgctggaagacatcgccaaggcgcaggccaaggtcgataccctggccgagaagctcgccaagctggacgctgtcgaagccaacagcgccgccatcgaagcgctgaagtccggcgactccgtgtcctacctgttcggccgcgccctgaacaagcgtgtcctgtccggcgtggtcgtcgccaccggcaagaacgacaagggcgtgctgcaactgaaggtgcagaccggcgaaggcctggatgccgagctgaacctgatcgacagcagcgccctgctgatgtcggccgaggaagttctgaaggcgcaggaagaaatcgacgccgccaaggccgccgccgaaggcggtgcgcagtgagcggcagcccgggcatcggcccgacccgcacgcagttcaccgcaggccgtgacctgaagccaggcatcggttaccgtgccatctcgaccggcgccggtgaggtggtggacagcgaccagtacctgctggtcaccaacgtgaccgacaagaagggcaaccgtcagctggtcaacaccagcaccggcgaggtgtccttcgccacgcctggctccatctggagctactgatccgacgaggatagcatgagcaataccctccccgataacgattggctaccacacgccgagcgcctgcctgttggtggccgcacacgagtgacccatgagtgcggggagggtacttccctgctgattactcgcgagcatgacaagtccaccgcgtactgtttcaggtgcggtggcacaggattcaagcatgagcacgagagtatagaggccaagcttaaacgaatacacgccgagcaagcgagcgagcgcagagtgcgcgaaactgttgagttgccagagccacgggtatacgacacccgcgagtggccgctcgatgccaaggtgtggttcttcaagatgggactctcgcttcagatgatcggcaagctgcggctgtactggtgcccgagcatcgggcgggtggtactaccgatcactgaaggcgacgacgttgtgtactggacagcacgaagcacaagccgtcaacccaaatggttgactcctgatgtgccgaaggatgggcttgtcgtacgctacggcgtgggcaagggggacaccatcgtgctatgcgaagacccgctatccgccttcaaggtgggccagtgcacagaagcgtggtcgttgctcggcaccaagctgcacaacaaagtgttgaagcagctgactgatcgaggccaacgtgtagcgacgtggctagatgacgaccgaggtagaagcgacggcagcaatcccggccaagacagcgcgcgagtaatcgctgcgcgtctgcgtgcgtttggtctggactacaggaacataacgtcaccgcgtgacccgaagtattacccgaccgattacatagaggagaagttatgtcaacagacctagccagtcagcgccgagcggtagctgtgtctttagtggcgcgcttcctatttgagagggacgacagcctctgcgattatgaacgaacggattacgagcgagaggaaagcgccaagctaatcgtccgagaggtgcttgaaatctacttgcaaggagaacccgatgagtcttgaaaccacgctgctgcggttgtgcaccaaccgtggaaagttcgagcggctcgtgcccagtgcaccacgtgacgggctggacgagctgaccgtgctggtgctcgatgcgttgcgtgcgtactacaaggagttcccggacacgaaggacttgccgttcgatgtgttcgatggctgggccttggagttcaagtggaagacgcagcccgacgacaagaagtccctgctgaaagttctgctgaagcagatgcgcgagcctgtcccgcccgaagcagagcaaggcatgatcgagaagctgttggagttggagctggcaaccactgcggtcagcaagatcgtgcagtggaatggcggcgccgagttcagcctgcgcgacgagttgtacggattggccgagtcgatcaacgaccgcatggatcgcaaggcccgccttcccctggtgcaggagacgcccgaggaactgatgcagatggacgagcacgacatcggcatccacttccgcctgcccacgttggcccgcaacctgcgcgcccttcgtggtggtgacttcggcatctacgccatgcgccccgacgcaggcaagaccacgttcctgacgagcgagtccagccactggatcacgcagctggacgacgtgtggccggaccagaagcgcaccggcatctggctcaacaacgagggaccgggcaagcgcatcaagcagcgctggtatcagtcgctgctcggcgctaccatcccggagatggtggagtgggcgaaggacggcagcatccgcaagcgcatcgaggatgcgatgggcggggacatccaccgcatgcagttctacgacatccacggattcaactccggcgaggtcgaggccatcatcaagcagaccaatccaggcttcatcatcttcgacatgatcgacaacatcacgttcagcggtggcatgaccaacggcggacagcgtaccgatcagatgttggaggcgatgtatcaggccgctcgcaactggtgcgtgaagtacgacgccgttggcgtggcgacttcgcagatcagcgccgagggtgagggtgtgcagtacccgccgcagtccgcactgaaggacagcaagacgggcaagcaaggtgcatgcgacttcatcatcatgggcggcaagctcaacgacccggcgatggaacgcttccgctacatcggcactccgaagaacaagctccaccgcgcaggcggtaagcgcgacgttcgggaagaagtgatgatggatgcagagcgtgcccgcttctatcaggaggcagcatgagcttcacttccttcgacctcgaaaccacgatccgtgccacgctgaagcgcaaggccaatccgttctacgacttgaacaagatcgtggcgattggctacaagcgcaagggtgatgcacagaacaccggcctgtactacgacacccgcatcggcgccgacaaccagtacatgggaggcgcacctgacgggtggttacgggagctgtgctacaacacgcagtacctagttggattcaatttgaaattcgacatcctgcacgccatctgccaaggcccgctcaaccggcaggcatggatcgagttcatcgacggcggcggcatggtgtgggactgtcagctcggcgagtacctgctgcacggcatgacgcaagagttccacatggcgagcatggacgagacggctcctcgctacggcggcaacctgaaggacgacgcagtcaagtccctgtgggctgcgggcgtggacacctgcgacatcgacaagacgttgctgatggattacctcctcggcaccaacgacaccgacgacgtaggcgacatcggcaacaccgagaagatgttcctcgggcagctcgccgccttccgtgcacgtggcggcctgcgctcggcgctgctcaacatgggcgcgctgtgcttcaccatcgaagccgagtacaacggcatgtacgtggacaaggactgggctctcgcgaaggcgaaggagttggaggtcgagctggcaacagcgacggccgaactcaacggcttcatccccaagctgcccgagggcctgaccttcaactggaacagccgcttccacaagagcgcactgatcttcggcggcaaggtgaagtacacggcgaaggttccgatcatgtccgccgaaggtggcccgacctacgtccagaaggacgaggtgcactacgtgctggtcgatggcaccacgactgcgacgccaccggccgaggacttcgagaacgtggggcggtacgtgacctacggaagcggcaagaacaagggggagtacaagaccaagaaggtcaaggtcgatgacctgaccaagcagaagttccgcaacgaggacatgctgttcgagttccccggctacaccgagccggatgctgcgtgggaaagcaagagtgatccgggtgtgtactccaccgccgccgatgtgatcgaggcgctgagctaccgaaacctgccattcaccaaggcactggcccggcgcgccgacatccacaaggacttgtccacgtactacatcacgacggacgagaagaccggcgagcagaagggcatgctcaccctggtggggccggacggtatcatccaccacaagctcaacatgaccaacacggtgacgggtcgcctgtcatccagcgatcccaacttgcagaacgtgagcaagggtgagctggacgaggagacgttggaggagaagggttcgcagatcaagcgcgccttcgtgtcccggcacaagggtggcaagatcatccagtcggactacacctccctcgaaatctacgtgcaggcaatcctcaccgagtgccgtcagctgatcgaagacctgaaggcgggcctagacatgcactgcctccgtgccgagcaggcgtggggtgagcaaggcaagtacgactacgacttcatcctcaaggcgagcaaggacgacaagcatcccgagcacaagaagtggaagaagaagcgtggcaacgcgaaggtgttctccttccagcgtgcgtacggtgcaggcgtggcgaagatcgctgcgaccaccggcatgtcggaggacgaagtcgaggcgctggtgcgcggtgaggccgagcgttacccggagctgggtgcgtacatcgaccgcatggtcgaggccatcaagcgcaaccgcgtgagcaccaaccgcttcgttccgcacccggacgcaggtcgccagggtgtgcccgccgggctgacctgtcagctgggccggtctcactggaccacgccggacggcaagatgtattccttcagcgagtcgccgtccccggtgttcatcgccaacaagcccgcgagcaagggcggctgcgcgcagtcgttctcgcccacggaaatcaagaactacccgatgcagggcaccggtggtgaatgggccaaggctgcgatgtacgtcagcctgcgcgccttctaccgcaagtacgttaccgaaccgaaggaatggttgggccgtgcgctgctcgtgaatcaggtgcacgatgccgtgtacgtggatagccacggcgacatcgcaacaaaggccgctgctctgctgcacgcctcgatgctggaagcgtcggtgtacatggagtggtggttcaactggccgctgcctctcggcgtcccgtgcgaaaccaagatgggcgacaacatgatggaggagaagaaccctcccgcagagttcgccggtctggtcatcgagtaccgatcgtcgatccgcaaggacttcgtaggtaatcacaacccgtcgtttgaacaaggagaactacacgcatgagtcttgacgcactgttgaacaaggtcgccacccagggcaaggatcagtcggtcgccagtggtggcagcttcgactacaccccgcccgctgccggtgtgaccaccgcccgcatcgtcgggtactacgaacagggcaagcacgagttcgagttcgaaggcaagaagaagacgcaggacgaagtcgccatcgtgttcgagctgaccggcaagcagcacccgcacatcgaaaccgacaacggcccggtgccggtgcgcatgaccctgacgctgggcctgtccaccaacgagaaggcgcactacttcaagatcttcagccgcctgcgcaccgaagagcgccacttcgtgcagctgctgggccagggtgtgctgctggaggtcgtccacaagaagggcaagaaggacccgaccaaggtgttcgccgaaatcgacaaggcttcgatccgcaagccgatcatgccggtgccggagatggagagcggtatcccgaccggcaagttcgtggacaccgtgatcccggtaccgcagcagatcaccccgctgggtgcgttcatgtgggacttcgccgacgccgagatgtgggacagcatcttcatcgaaggcgagtatccggagcgcaaggacgagaagaccggcaaggtcatcgccgaagcgcgcagcaagaaccgcatccagctgaagatcgcctcggcgctgaacttcaagggcctgccctgctacgactacgccgccgccaagctgtcgggcagcacgacggtcaccaaggaaggcatcgacgccctggacgaagtggtcggcgacgtggcgcaagccccggccgccgcaccggccgaggacaagccgccgttcccgatggacggtaacgacccgatggcgggcatcgcctgatggacctgagcgctctcatggctgcggctggtgagcgctccccgatgccggtgcaggtggtacgtcagcacaacccgcgcgtgatcgctcacgttgacggggactacatggcgtacttcgcggctggtagcgagaactgctcggcgggggatgcacggcgcaacgtgctctcccgctgcgcacagctgaagcacatcagcggagcgggcaagatcgtgatgcacctgacgcatgccgcgtctaccaagggtgatcgcttcctcgctgctaccacgcagccgtatcagggtcagcgccaagcaggccgcaagcccaacaactgggcgttccttcgtgagtggatggagacctacgagggcgacgctttcactcccaaaatctggctgactcgcgaggccgacgacggcatcgcatacgtcaacgagggtgcagcattgcaccacaacgtactgcacgtggtgcacagcgccgacaaggacatgcgaatgttctgtggcgttcacgtagactgggatggctacggtatcacggaggttccgctcggcgcttacgacatcgtgggcgagaacggattgcagtacggtcacaagtggttctggatgcagatgctccacggcgacagcgccgacaacataccgggtctgccgaaggttggcaaggtcaaggcggagcagctgcttctcgacacgaaggacaacctcgaagcggtgcagctggtgagtggcaagtacagcgaggtgctcggcgccgactggcgcaagaccttcgccgagcaggccgtgctcctgtggatgcggacggatcgcgacgctgaactgctggacgtgctgaagctcgacgtgttcgggccgcagctgaagcaagcattctacgacctcgccgaggacgtgaacgagaagcgcgcaatcctggaggcatacaaagcatgagaacgaagtggacaataacgtgggcgtggatcaagtacacgcccaatctccggtgggaaaccctgaagtcacggtaccaatcgtggcgttccgttatcggggactacccatggtgaagcgactcactgcaacgcaagtcaagctgctgcgcatcaagttcgcagcggagcagggcaaccgatgctgtctctgtcaggggcagttcggcccgaaggctccgctcgatcctgtcctggaccacgaccacaagaccggcgctgtgcgcggggtgctccatcgcggatgcaactcgctgctcggcaaggtcgagaacaacgcaggccggtacggcgtgcgcgatgtgttcgcattctgtgcgggcatccccaactacctgcggtcccacctaaccaacatcacggggtacctgcatcctacctacaagaccgacgacgagaagcgcatcgctcgcaatgcgaaagcgcgaaagcgtcgggcactcaacaaggagacaccgtgaccctcacacagttcattcgccgagcaccgaagcgcggcccgaagattctctgcctcgacatcgagacgttccccatcgagttctacggctgggggatgttcaacaacaacttcagcgtcaagcagatcaagcgcgactggtcgctgatgtcgttcgcttgcgaatggctggacgatgaggagtcgttctacatggaccagcgcaacgtgcgggacgtgttcgatgatcgcaagcagggcaaggcgctgtggcacctgctcaacgccgccgacttcgtgctcgctcgcaacggcaagaagttcgatctgcgcaagatcaaggcgcgcctcgccatcctcggctttccgcctgtgtcgcctgtgcaggtgatcgatccgctgctgctgaaccgcgccgagttcgcgttcacctcgcagaagttggagtacaccaccggcgtgatcgtgccggagctgcgcaagtacgaccaccacaacttccccggcttcgacctgtgggtggcctgcatgcagaacctgcccggcgcgtgggacgagtgcgaagcgtacaaccgcatcgacgtgaagtccatgaagttggagtacaagaagctgcgcggctggtactcgcagcatccgaacgtcgccgtgtactacaaggccgatggcagcgagcaccgctgcaacaagtgcggctgcaaggaaatgatcccgcaggatgatccggcccgcacgcaggtcggcacgtacctcctgcttcagtgcaccatgtgcgatggcttcagtcgtgggcgcaagctgacgaccagtgccgaagcgcgcaagcacatcaccgtcccagcataaggagaagcgcatgagacttaccgacgttcgccacggcgaccgcgttcgctacaccggcactgccccgggcctcgtcggtaagtccggcgtggttcgttcgatcagtgcagcagatgttggtgttctgttcgacggccagctgtacgactccgcgatcaagccccagttcctcactcgcctgatgagcgtgggaggtatcaccaccacacacagggaggttccattgcccgagcaactgaactaccgtaacgaggacgagcgcacgtcgtccgaccggggcgtcggcctgaaggatgacggcggcaagccgcaggcgcggctgctgtacgaaggcgtgccgcgtgccctggcccgtgtcatcgacaccctgaccttcggtgcgcagaagtacaaggcgcactcgtggcagttcgtcgagaaggcggccgaacgctatcaggatgcgagctaccgccacgacaacaagcgctgcctcggcgagaagctggacccggagacgggcgtccaccaccgggcacaccacatcatcaacgagctgttcctgttggagctggaactgcgcgaggaggagaagggttgacggcctgcgtccgctgcggccaagtgcatcggtacgtcccacatgaggccgagtgggcgcgcttcgtagaggagcaccgtacccgcaagcaattcgatgtcgagtgggcgaactcactccaccatcgcacataccctgacgacgccttctgcatcctcgtgatgaaggggcgcgcaggtttcgttccattcccgtcgaaggagaactgaatgctctacaagaaccagaccgccatgctcatcaagtcctacgagaacaccgtggcgtggggcgagagcgccgaccacgaggaggcgttgcagaacgcggtcaaggcgggcttcccgaatctgccggaagcagaccaggccgaactgtacacccgcatcgccgaccagtgggaaggctaccgtggttcgctcgccccgcgcaagctgtggatcggcaccatcgtcaaccagttcatgtcgtcccgcatcgctcggttcaacgccgcgctgggtgacggcaccgctgcaaccgccaccaccgccgtaaagaagaagggtgcgaaatgagctacatcgtccacaaggcagtcgagcaggacaaggtaaagaagaagctgcggcccaccgaggagcagctgcgcaccgagtacatcgcccagccgaagtacgacgggtgcaacatggtcgccatcaagcgcgggcactgggtccccgccgtggacaagggcatgcacgccatcaaggtgaacgactggcagatgcaggcggtggatcgtggcgtggttgacctgttctcccgcaccggggagcaggtggtcagcgcgcaccacatcgagaacgccctcgcagcggcgccgttcttcccggtcggcgtgtacttcggggaatactggcacccgacaatcgaccagcccaccgtcagcggcatgttccgcaagaaggacggcacgcagtacaccgagccgatgttcgtggtgttcgacttcgtgacgctggaagagtgggagcagggctacagcgacctcgtgtatcaggagcgcgtcagtcgtctgccgatcctggggcactccatccccgaaggcgcggcgcccgtgttctacgcggagtcgcagggcttcctgatcgaccaagacatgggcagcatggaagcggcgaagctgctgtgcgagggcggcgcgtacgatggcctgatcctgcgcaagccgagcggcaagtggatgaagggcgacaagggtacgaacggcgaagtcatcaaggtcaagccgaccctgacgctggacctgcgtgtggtcaagatcaacatggctaccggcgagaagacggggcgcgatgtgtggaccgtggtcgttgacctcggcgatggcaagacgcaggaggtcggcagcggcgtgccgcacgattccgctgcgctgccggtcgagggagacatcgtggagatcgaggccatgtccttcagcaagtacggtctgctgcgcgagccgcgctacaagggcatccgccacgacaagacggaggccgacctgtgatcatcgacctgggcgagttcaagcgcaagagcggggatatgacgagcatccgcgccaccgtggacggcgaggtgttcgagttgaatcgggtgttcgatccaacctacgaggaacacttccgggagcacatccagcgcggcatgttcctggaattgatggagcatatctacgacaaattcatgaaggagtaaacgatgctttcgcaagtggaactcgaactggaaacctacgccttcggtaaggagcgcatggagaagtccatcgcccgtaacgaggagaagggcggcgcggacaacaacccttacgcccaagcagtgtaccgccggttcgtgcttccgcttgcggagcgcatccgcgcagacatcgactccccgcgcatcggacgtgcccaggcccacgtgccacttctgcgcgccaagtacgatccggagcgtcagaacaagcgtgggcagcccgtgagcgccgaggaacaagcccgcgagtggtacgaggctgtggccttcgtcgccgttcgcggtgcccttaccacctgcatgcgtgacaagcacggcgaaggtagcgaccgagacgtgctgaagagcgttggcaccaacgtgtaccacgagtacctgttgacgcagttcgccgacgctaagccgaccctgttctaccacctgatgaacgacatggaccgcaagctctctgtcaacgagaaccaccgcatgacggtgatgaagatgcagggtcgcaagaacggcgtcgagttcgtggagtgggggcaggcgcagcgcgatcaggtcggtgcctacctgacggatcagctgtcgcagctgggtatgctggaaatcggcgtgctcaacaacacgcagtacaaggacggtcggcgtacgcacaagaccgaggtgaagataatgctgactcctgcggtgtcctcgctggtgcagcagatcagcgacttcgtgatcgaggctactccgttcttcctgccgtgcgtcgagccgccgcgtgactgggtagcgattgacgatggtggtttccacacccaggagatgcgccgcctcaacccgtggatggtcaagacgtatgcacagacccgcgacgactaccgtgatgcgggactgaacaacgagatgcgggcgatcaacgcattgcagcgcgtgccgtggcgcatcaacaagcgcttgatggaggccgtgtccagcatcgccaaggtgcacgacatggacgaaatcattgcgcagggtgaactgcccaagccgcgcaagccggactggctgacgaaggacatgaccaaggaaacgatgtcgcaccagcaggagctggacttcaagaagtggaagcgcgacatggcgaactggcataccgacgagcgtctgcgccagaacaagggcaatcgattctacaacgcaatgaaggtggcgcgcaagttcgccgagtacccgagcatctacttcgtgtacttcgcagacttccgtggccgcaagtacgttcagaccaccggcgtctcgccgcagggttcggacttgcagaaggcactcttggagttcgccgaaggcaagccgctgctgacgaaggacgcgcaggattggttctgcatcacaggagcaaaccgatggggttacgacaaggcgtcgctgccggaccgagtgaagtgggtgcgcgagcatcacgaccagatcatggccttcgctgcggacccggtgaacaacgacgagtggaagacggccgacaagccgttgcagtttctgagctggtgcatggagtacgagcagtggcaaatattcggggatcgcttcctgagccgcatcgcagtcgggatggatggttcgtgcaatgggcttcagaacttctcggcgatgctgcgcgacgcagccggcggggtggcgacgaacctgatcccggcgctgctgccgaatgacatctaccagatggtcgcagaccgcgtgactgcgatcctactggccgagcaggaagacgaggcagggttccgcaccctgtggctcgaccacggcctgacgcgctccctggtgaagcgcagcgtgatgaccctgccgtacggctcgaagaagtccagctgggcagacttcatcgtggacgactacctgaaggaggggaagttccccggcctcgacaaggcgctccacatgcccgctgcgcgcttcctgagcatccgcatgggggaggccatcgccgacaccgtggtggccgctgcgggcgcaatggcgtggttgcagaaggggtccaccgcgatcctcaaccagggctacgaccgcatcaagtggatcaccccgtccggcttcccagtcacgcaggtgtactgggaatccgacgagcaccggatcaacaccaagctgtgcggcaacgccaagctgtcgatccgcaagagcaccgacgaggtgaagaagtcccggcaccgcaacggcatcgccccgaacttcgtgcacagcctggacgccagccacctgaccctggtggtcaacgccgccaaggccgagggcatcgacgccttcgccatgatccacgacgacttcggcacccacgccgccgacagcgcggccctgtaccgcatcatccgggaggtgttcgtgggcatgtacgagcggcacgacgtgctctcggccttccactcggcctacccgttcctgccggagccgccgccgatgggcgatctcgacctgcgccaagtccttgattctccgtacttcttcagctgacggagtttcagtacacctacagctgagagggtggttggagcggccgcgaaggtaagcggaaccggtgccacccttttggtacacctacagctatgaggagacaccgtggccgaagacgccaaagtgaaagtcctgatgacgctgcacccgaaccagcttgccgccgtgcggcgactgtccgggctgtcgctgtccgtcaactcgaataccacgcccttggaggcaggtatgcagttggggatggctcgcgtcctgaacatcctacaggagggtttcaccgttgattcctccctacagaacaccaacgacgggtgatagtgagcagatcaaggcggctttaacggccgctttgtatctgtcctctagagaagatagtaaagtagacaatagagaatcctctgtaagctacaactgtgatgatcctgattatacagtagctctgataactcagaacttagtagatgcagtaatcatagatgaagcttatctactatgctttgccattgtcacaccgtggtattccaagaaccgtactacgttcgttgagaacatggtgctgcgaattgggccgggcagttccttcgaccggtacatagccgtgatggaacacttggctgacatcaaccactgcgactcactgagtgcaggtggcgcactagctcggaactcccgagcactcacacggatgtatgcacgctacggctacctgctggaacgtcatgctccccaattcaccaagcgaaggagttaacctatgggtagcatccttggtggtggctctgcgaagaaggctgcgctgaagcaagcggcggctatcgacaagcagaccaacctccaaacccaatccacgaactaccagatccaggcgatggccgatcagatggctcaggcagctgcacagcaggccgcatccgagtacgccgagaagttgctgagtgcccctgtcgataccgtcgatgtgcggctgggtacttccgacctcgacttgcagaccgccgacttgatcggccgacgcaagaccgcccgctccgcctacacccgacccgtgaccacgaccgcagcttcccggctgacgactgtggccgggtcggacctgttgtgaggtgagcatggaccactcgatccaaaccgcgcatcgccagttcgaggcgtacgacaacaagcggaacggcatcatgtaccggctcgaacgatattcgagctggactgtgcccaagctgttccctcgcaagaaccgcgaccaggacaccgagccgctgagccacgggttccagtccctcggcgcgcaggcagtgaaccatctggcgaacaagctgatgatgtcgctgttcgcaccatcccgaccattcttccggttggagatgaagcgcaaggcgcgggaggcagcgcaggatcaaggcctcgacttgcaggctatgcaggcgatgcttgcgaaagccgagcaggatgcgagtctcgaactcgacaagcgctcgatccgctcccgactgtacgacctgctgaagatgctgatcgtgctgggcaacgccctgatggtgttggagaaggacacgatccgcgtgctcaacatgcggcactacgtggtcaagcgcacccgcaccggtgaagtctacgaactgatcatccgggagaaggtgcacaagacccagctggaacccgcagcactcgctgccattgtcgcacacccggacttcaagccggatgatgacggcatggtgtgggagtacaagtggctcaagctggaccaccagaccggcaagtacaacgaagacgtgtggatttgcaactgcaagctgcccgccaacttctcctcgtcctactccgcagacaagctgccctaccgggcggtgagctgggacttggccgcaggcgacgactacggctccggcttggtcgaggactacgaggcagacttccagtcgctctcgatgctgtccgaggccgcagtgcagggagcgatcctcgcatctgagttccggtggctggtgaacccggcaggccagacctccgtcgaggacttcatggcatcgcccaacggcgcggccatccccggcatgaagggtgacatcgagctgatcaacgcaggcgtcgatggcgtgctgcaaaccaaccaagcaatccagtccacctacatcaaccgcatcggcgcaggcttcctgttgcagacggcggtgacccgtcaggcggaacgtgtgaccgcgcaggaaatccgcatggtcgccgaagaactggaaggcgggctgggtggcggctactcccgcatcgctgcggacgtgcaggtgcctgtcgccttttgggtgatgaacctcacgggccgcgacatccggggcaaggacttggagcctgtcatcatcaccggcttggccgcgctctcccgaacgggtgaccgtgaccggctgttggagttcggcagcaacctcgccaacgtcctgtcgctaccgccacagatcctcgaacgactgaagctgtccgcgtggatcgccgacctcgccgccgctggtggtttggacccgaacgtctacgtgctgactgaggccgagtacggccagatgatgcagcagcgtgcgcagcaacagctggtcatgcagaacgcatcgcagcagatcgacaacgccaacaacatggagacacagacacaatgagttccaatgcacctccgggcggtggtcccggcgcaaccgtgatcgcaacctcgcaaggcaaccagaccgcaccggcagcccaggctccggccgacgacaagctgctgaccggcggccaacccgcacaggcgcagcccgcagtccccgcagcacctccggcggttgacgcgctgagcctcgaacccaccgcgcctgcacagaccaccgctccggcggccgctgcgccaactgctgtgtcgattccggactacggcgacaacggcctgaacatcgcggccgaatacttcgtcaacaccgtcggcctcgacatcgacagccgcgaactgaccgaagcagcgaagggcaacttcgccctgctggaagccaagctggaagtcctgggcgacaaggccaagggttccgcaccgatcctcgctctggcgaaggaaagcatcgctcgcgtcaccgccgctgcaaccgcagcgcacagcgcgaacgttgctgctgtccacgaagccgtgggtggcgcagagaactgggctgcgatccagcagttcgcacgggccaacctgcccgccgaccaactgaagcaggcaggcgaagcgctgtcggccggtggcttcggcgcacaggcgaccgcgcgctacctgatggctctggcccaggccaaccccgcgacgaccgtcaagggcgcaccggctaccaacgccgccgctcctgccgcgtcgatcaacggcgtcgctcctatcacgaaggagcagtaccgcgctgagtaccgcaagctggttgccgagaagggcatccgtggtgcggcccactccgaagaactgcgtgcactcaacgcgcgcgtcatccactaagacccaaggagcaacataaagcatgagcaccatcttcccgaccgtcaccgttctgccgaaccaggtcaaccagtccggcaacgagaacgccctgatcctcgaacagttcaccggcgacgtcgagcacacctacgtgtccagctcggtgctggaaaagttcttcccgcgcaagcaggtgaagggtaccaacaccctgaccaagaaggccatcggccgcaccaagctccagaagctgaagcgcggtgacgcgccggacggcaccccggtggacttcagcaaggcgtcggtgaccgtcgataccatgctgctgtcgcgtcactccatctggcagctcgacgagatcttcaccgacatcgacacccgcaaggaaatcgccatcgagcagggccaggagatcgccgagttcgtggacctgaccatcagcatcgctgcggcgaaggccgcgtcggccacccagtccatcttcacccgcaacggccgtgcgccggaaggccacttcggtgccacccaggtgaccctggcggcggcgggcgacgagaacgatccggccaaggtgtacgcggccatcggcaagctgttctctcgcatggaagaggagaagaaggtcaagccgcagcgcgacggcgtcgtcctgatcgtgcgcccggcgatcttctacctgttgcagcaggccgagcagatcagcaacggcgagtacctgacctcggacggcaacaagctgaccggtatcccgaccttccacggctggggcgtcccggtgctgtcgagcgagaacctcccgaacaccgtcatctcgggtcacctgctgtcgaacgacgacaacgacgacttctacgacggcgacttcagcaccctggtcgctgtggccgtgtcgccgaaggccctgatgatcgccgaagcgctgccgttgcagtcctcggtgtggtggagcgacgcctcgaagtgcttcttcgtggactcgtggatgtccttcgccgtcggcctggatcgcgtcgagaacgcgggccgcatcgacaaggctgcctaacccgctgggcgcggtccctgaatccttcgggtaactcaaaccgcgccttgccttccaccaacacaggagcaccatcatggtctttgaccgaccgttcgaaatttccaaccgtgtcgtcgccgcaactggcgtggccggtctgcccgccaactccgtgggcaccgtcgtcggcgtccactacaacgccatcggcacggcctgggtcgtgcgtgtccgcttcgtcgatgacgaaaacggctcgcaggacgtggagtacgcaccggcctcgctggccctggctgcgaactaagcaacatcctggcaggggcgctccggcgtctctgccttgttcctctcaggagacaccatggcattcatcaccaagctcgacatcgtgaacgcctgcatcaagacgatgggcgagacgaagctcaacacgctggaagaggaccacgtctacaaggacgacgcagttgacctgatcgaccgcgtgcaccgcgacgtgtcgtcgctcgcgctgtggttcaacaccgaatgggtggagctgaagccgcaggcaacgagcaagtacatcatggtccccacggacgtgctgaagctggactgcaacccgagccgcttcggccacgtggtgcagcgcggacgccgactgtacgaccgcaagcgcaatacctacgagttcgatcacagcgtgcaggccaagctggtccggctgcttgacttcgacgacctgccctacgaggtgcagatgttcgtgcgggacgacagcgtgctgcgcttccagtccgacttcgatggcgacaacaccaagtacgccaagatccagcagcagcgcaacgactcgtggatcaacctgaaggccgagcacatccggcagatcaaggcgaacccgctgttcgcgcgcgcatccgtggacgttctgcgtcagcggtacttcaactacagcggacacccgtggcatagccacgtcactttccccggctaaggaggcatcatggcaaaggcaggcggaacctatcccgacatcctacagggtgtcagtcagaaaccggcgcatcgtcgtcgggcgggtcagacgcacgagcagatcaacgtgctgtccgatccggtgaatggcctcgtgcgccgtcgcggtacgcggttcgctgctgcccaagccgttgtcacctcggccgaactgcgcaacatggacgtgttcgatttcatgcaggagggcaaggagtacgcgctgctgtatcggcgcgacgcctcgtcgtccagcagtgcgacgttcgcgttcctctacaacaagacggacgaggcgttcatcccgttggtctacgagaacagcacgtgggtcaacacgttggtcagcggcggcgcgtcctctctcgcggccatcggcagctacgtctacatcgcgggcaacaccacgatcccctcggccaccagcaccaacgtgtggcaggagcagacgaacatccagcgcctcgccgcgtgggtgcgcaccggcaagtacaacaccacgtacacggtgaacctgacgcgcacggacaacacggtgctgacggtgacgttcaagacggtgaccgcgtcgtaccccggcacgctcgacacgagcgacatcccgttctacctgcccggcggcacggagccggacgcggcgtaccagaagcacgtcaacgaccgagtgaacgagtacaactccgcggtcaacgagtggatcgtgaccagcgccgagcagacgcgcccggagtacatcgcggagaagctgtcggatttgctggtggacgcaggagtatcttcgacgtacatcaagggcggtatcgtcattgacgacgaccagttcaaggacatcacggttgacgacgagggcgacggcacgaccttctacgccgcagggcaggagattaccgacgcgacctacgctgtcaagttccactggcacggcaagatcatccgcgtgcgcccaagcggtgcaggtgctgacgagacgtactacctgcgcgccgagttggagaacggcgagacttctggctacggttcggtggattggtacgaagcgcctggcgtggagtgcaccatcgacaacctcgtgtcgcagctgtacatctacaacggtgtgggctacatcgcacgcaacggtgcgggcctcacgtccctggctccgggcagcggcgcacacccggcttacggttcgcgcgtcgcaggcgatggtctgacctcgccgatcccgtggttcgtcggcaagccgatcacgatgctgtccgtcttccaagaccggctgatcgttggcgcgcagaactacgtcaatgcgtcccgctcggcggactacctgaacttctggcgcggctctgccgtaaccatcgaagacagcgaccccatcgaaatcttcgcgcacggtagcgagggcgacgtgctccggcacggtacgctctacaacggcaacctcgtgatcttcggtgaccggcagcagtacggcatcagcggcgactcggtgttcagtccgaagaacccgctcatcaaggcgttcagtgcgaacaaggattcggtggacgcaaaggcgcagacctcgggcaactacatcttctacgcgcagtacggcagcgaaggtacgagcctgcaccagatgcgcgtcggcgcactcaacgggcagcagacggttacggacgagatgtccaacgagctggactcgtggctgtcgggcacgccgttgcagatcaccgcactcaccgcaccgaacctcgtgatgttccgcacgcgagagcacccgcaggacttctacctgtaccggtacgaggacaacaagaacaacgggcagcgcatcgtggacgcttggtcgaagttccagtaccacccggcgctgggcgaaatcatcggcatcagcagctacaagaagaacggcctcgtgttcaccgcgcgcggatcgctggtggcgtgcgacgtgttcgatccgaagggcgagccggactcgcatgcgtgcctcgatagctgggcgcgtttcggtacacctacaggcgtactgaccgcgagcgcgagcatcgccgtcaacaagactagcccgtacttcctgctgggttgtccctacgctcaggcgtccgacttccttacccagttcgatgacctcgacgctgatgcgttggagtatggcgtggtgtccgaggcgctggtgattccgaccaatccgttccctcgggaccagaacgggcaggctgtgctcgacggccgcatgtcgctgaacaaggtgacggtggacgtggaggacacggcgggcatgctcgcttcggttaccacccgcaacgggagcatgaccaccactgacttcgagggccgcatcctcggcgactccgacaacctgatcgcgcggcaaccggtgtaccgggggcagctgaacatcagcgtcgggcgcgaagtgcgcgagtgcacctacgagattcgcagcaaggattggctcccgctccgggtgaccggcctcagctggacgggtcagactttcaacaatgtacggagggttagctaatgggttcggttaatacgatcctgcaagcgaacaacaccacccgcatcgctcgtgcgaactaccgtgcagccgttgcgcagaccgacaacacgaaccggagcgaggtcgccaagactggcttctcggatttcatgcggtccctgaagaacaacgcccagctggacgccgccgccaaggagtacaactccaacatggaggcgctgtccgaggagctgcgtgcacgccaaggggctgggcttaactcccagctccaactggcgaatgctcgcggtgcgttgcaggcgcaggccggtgctgtcggtgtcggcggctcgtccgcagacctgatggattccatggtgcgcttgcaagcggagatggacaaggagacgcaggacaacgcggtggcactactcgcctctcgcggtgcatcgcagacggcgcaggtgatggcgcgtgcgtggcacgggatggacatgagccgcacgttcggccagttcgactacgcgcagcatatcgagccgaaggcaatgaagcgtcgcttgggcaagctgatcggcgtggccgtggctacctacttcggcgggccgatggcaggcgaggccgtggcggacttcgcagtcggcacgtggcaggcggacaacggcaacttccaaggtatgtcgcagtccttcaacaacgcagcacagaacgggttgcaggcgtggcagcagtccaacgagcgcggcggcaagtcgtgggcgtctactaccttcgggtacaacgacggcaccggcaagcagtccgtgacaggggcgaaggtcaccggcaacttcggcaacaactacgacaacttctccaccactacgtccggcctcggctggttcgatagcggaagcggaggcaactcaggaggtgcatggtaatggctgacatcggcacggttaccttcaacacgcagtccgcattgcagggtggcatcaacgccacccccgcactgtcgggcaacaccagcatccaaggcgctggtgtgaatcaggtcggccccgttcgctcggggtcggattggttcgagagcactggcggtatgacgatgccggacagcaacctgcccgagttcttgcaagaactggcctcgccgaacaccgccaagctcaagcagcagcagatgtgggacggcttcgttgccgcccgcgcgggcaagaccatggacgagatcgctgcgaccgagccgtggtacaagaagatcttcggcgacaccaactacgagatcggtgcgagcatgtacaacacgctctcgcaggtcaacgagatggagagcgacctgctgcggcgcatgccggagttgcgtcagctgccgcccgaggcgatggcgaaggagttcaacgaactcgccactgcccggatgaccggcaacggtttcgcggacacggtgttgcagaagaccttcatggatcgtgcgggttcgctgatggacctgcacacgaaggagcgcacggcgtggcagcagcaggagctggtgaaggcgcagtacgctgcgaactcgtcggcgtccaccggcttcaacgaactggcgaagcgcacggcgatgctcggcaccaaccgtcccatggacgagaaggccaccgaggcgttgacccaggcgcagctgtcgctgctcgacggcctgtcgccctcgcgctaccagacggacgagtcctacaagtccgcgatcacttccttctaccgtggcgctgcggatcgaggcgagttccacacgctgaagttcctcaacagcaagggcgtgctgaacgccatcgacccggacgggcagctggggatccagcagtacgtgaagcaggcgcaggatcggtaccgcgcggactggctcgacgccaacccggagcaggccgagaagatggcgctcgtctccatgtacgcatccgagggcatcggtgccaagccgtcccaggcgatgatcgaggaaatgaactccacctacgccgctgagactggcagcgacgcaccgctctactcgggcacgcagctcgcctcgatcatggcacagtccgcaggcgcacacatccgcgcccaggaagccgtcatcaaccagcgcaacgcggcggccaaggctgcactgacggaccagcagaagttggctgctcaggaggaggacatccgtggtggcatcgaggcgttcaagcgcggcacctacgcgcagacgatcaacattcccggcgtggacaaggagctgatcgaagccaacacggtccaggcgtggaacgacacgatggcgaagaacccgaaggtcgccatgtcgcagctggtgtggaacgccaacaccggacgcggcgccgtgctcaagggcgtggccgaccagttccagaccacggcgcgtgccgtgctgcgcgaccagccgaacacggcagcggctgcgctgtaccagcagtggaaggaacttaagcagaccaccgccgcacgcatcggcactgacgggcagcctgtgcagggccgactgaccggtgcgactaccgccgcgctgtacttcggagatagcgtcaacacgttcttcaacaagctgcaagcgttggagaatggcggcgtgaacttcgagcttgcctacgaggtggcccgtggcgaaatcaccaccgacgatcccacgaagttcgacgcggacagccgtaaggaatccgaggctactcaggctcgtgttactcaggctatcgcaaagctcaaccccaagtacctcggtatgttcggcaacaagcttggcgactctggccgcgctgcgtatgctcgcgccatcgtccgctcggtcaccgacaccggaggtctgctggacacttctgcggaaggcttgcaggctgcggctactcacgccaagctggcctacggtctggaagacgcgggcaagtacgcatgggagaacgggcgtgacgacgagggccgagtgatcggcggcgtcggtgcgtggctgggcttcatggacacgaaggagacgggaccggctatcgagaaggctatcgacgcagcactgcgccgggtcaacatcgagccgaccaccggcctgaaggccgacgtgttccgcatgaaggacagcgagactggcgagcccgtgctgtacgtcaacgctgttggcgagaagggctggaaggttgtgccggtgtacgggcgcgacatcaaggccgagtacgagaagcacacgaaggagcagcgtaagttgcaggccccggtaccgcagggctacgttcgcatgaacgacggtacgattcagcagagcatttccatccaacccaaactgtaaggagatagacaatggcactcgatctttcggggctgacccaagaccagcagattgccaaggctgccgcttatgcgggagtgccggagtccgtcgtacgtggtcagtggcgagtagagtccggcaacgggcgtgccgccaaggacgcggacggtattatccgcagcaaggcaggtgcgcggggtgacttccaagtcatgcccaccacgcaggcaacgtgggaagcgcgcaacggtcgcaagtacgacatgcgcaacttccaagacagcatcgagctgtacgccgacatcatgcgcgagaacatgcagctcgccaagggcgacgtaaccaaggctctgcgcatctaccagggcggcaccaacccgaagaactggggacaggagaacgcggcctatgcacccagcgtgctgggcggcgcctcggctcctgctgtgtcggcacagccgcgcagcctgagcaccacacaggcggacctcaacgctgcgtggcagggcaacccgaacatgcgcgaccgcacgtggtccggtgcgtccatcccggatgcatggaccggcgctcccatcgaaggccgcaacgccctggcgtcggctgcgaaggaacacatcggcaagattcgtgcgggcatcgccgagctgtcgatggggcagatcgcgcaggaaggtggcaccgccgagcaggccgtgggccgggcgcaggccgtccgtgcatcggatcaggttgtgccgtggtgggtgcgccaggaagtggactcgctgaacaccggcgcccgcaaggcgctgctggatcagaccgagcaagcactcgcacaggatcgtgcggacgaagagctgcgcaactcgctgacgttcctcgacaagtggggcgcggcgttcgatagcggcatcggtgctgcgatcagcaaccagtttgcacgcgaagaccagaacatccccgagggctggaagtacgacccgaaggaatgggagaagccgtggatgactgccgacgaactggaagacatccgcgacgcagcgtactcgccgaacgagttggcttacgtggccgaccggcagttcatgcggcgccactccatgcggatcaaggatcagcagaccggctggtcgagcttcggctacgacctcgtggcgggattcaccgatccgggcaactgggctatcggcggcgtcaccgctgcgggtgccaaggtgctgggcgttggttctgctgcgctggtggccgagggccgggtgggtgcgtcgctcgcatctgccgctgcggagaacgcggtcggttccgtcatcacggacgccgcactggtgagcctgggcgagcgccgcaacttcgcggacttcatgaccgacgcagcattcgcaaccaccatcggcaccgcgatgcacattccgggcgtgcgctcggcttcgcagattcgggacaaggccgccatcgacctgtccgcaggcaacgctgccgcttacggcgaagcgtggtcggctgacctgaaggcgcgcgctgtgtccgagctgggagagaacgcaaacccggtgatcatcaacaaccgagtccaccagcttgcgaagcaggaggccgtggactggctgcgcgccggtatggctgacgtgcctgacgacttccgcgtcttcgcacgccccgacgtgcaggagacgaccaccaccgcaggtaccaccggtacgctcgcgcgtgacgtggacaacgtggactccaccaccggccggtacaacgacaccgttggtgggcgggcggatcagcacgacccgctgttggagcgtgcatggaaagctgccggtatccagggcggcaaggtggacggcgtactgaagtacctcgaatccaacgcatccatcccggaggacatgcgggctatcgccaacgcgctgaagcgtggcggccgtctcgacagcgtcaagatcgtgccggagcaggagctggacaagtggttcgctggtgccaaccccggccccggcatgaagatcgcaggcgggtacaacccgagcctggatgccatggcgatgcggaactacaacccggagacggtgctgcacgagatgctgcacgccgctactctgcgtgagctgcgcagcaacactgcgttcgggcaggagatgcaagacctcctgacgcacatcaacagcagcctcgacagcgtggactctacgctgaccaccgccgcaatggagggccgtgtcaaccagccgcaggcgggattcctcgccaatacggacgagctgatttcctacggcctcacgaaccgcgctgtgcaggcggtgctgcgtcagatgcctgcgccaggaaacacccgaccgaatgcgtgggagtggctgaaggacaagatcgcgcgagtgatgggcctgaagaaccaggagtccgcgctcgaacggctgatgtctgtggtgggcgagaacgttggcgcggaggttcgggacacgcaggtgcagacccgccagactcgcggtatgctcgccaactcgatcttcaaatcgaaccgcgagcgcaaggcgttctaccagcgcacgggtctggacaagtccgtgagcgacgacgcgatgcgcgtgcaggttgctgaggtcatggctcgctccgagcgattcagtgcgaagtacggtatcgacgcagccaagctgtccaccatcatgcagcgcttcgggctggaagctacgagcacgaccctgatgtcgtcccagtcgccggtcgcgcgtatgctcgcggtcaccctgttggagaacccggagggtgcggcaggccgacacagcacggcggcgatggatcggcacggccggttcgagtcgttcatgggtacgcggccgcgtcagtgggaagcggcctaccggctgtggcgtgctgaggtgcgcggcatcggtgcggtcaaggacttcgccacgggctggaaggcacgtgcggacttcgagtacgcagtgaagctgtaccgcgagacccgcttcaacggcggtgacatcccggacgcgcacgaggcagtgaaggcgatggcccgagagatcgaccgtggctacaaccgcatggcggcagagcagcgcgcggccggtacggtgggcgcacagcgtctgccggaagaagacgtggagggctacgagtcccgcacgtggctgggcggcagcatcgctgctgctggtccggttcgccgcgagggtatccgccaggcgatgcgcgagcagttcgaggtgatgggtgagctgtacggggacgagttcctcgacaagttcgctaccaagtacctggagcgtatcgagcgcaaggctgcgggcatcatcgaagcgccgggtcaggtcttctcggagtcgcaggcggacacgctgcgtgacactctgcgggcgatgtcgctcaacgaggaggagatccagaaggtgatgggcaagtacagccgtggcggtgcgaagcacaccaagtcgcgtatcgacctggacgtgaccaagcagtacgaagacgccgatggcaagttccgtctgatggactacctcgacaaccgagtgatggacaactaccgcaagtacgcgggccgggttgctggtgacatcgccctggcgaagcacggcatcctcggcgacgcaggcatcaacgtggcgcgcgaagcaatgcgcctgaccggtgccaccgacgtggagctgaaggcgttcgagcaggtgatgtcggagttcctcggccgccctgtgggcaatggcgatccgaccgttctggcgaatgcgcgactgctaacctcggctatccagctgggcggcgcgggcatcaatcaggcggcggagtacagcaatggcctcgcggccgtgggtgctgctggtgtggctgacgcaatccgtatcgctccccgcatgcgtggcgaaatcatgcgcatcctgaagggcgaggagagtggcaaccagatcctcgacggcttcgagttcatcagcggtcggggcttcggcctcgccggttacgacctgcacatgttcaactcgctggacacgcaggcgtcgatgtacggcagcgagcgcgcaggcttcctcacctcgttggtgcagaaggcagcgcacacgaaccgcatcctctcggggcagcgggctgtgctcgccgtgcagcagcgtggcttcgcggaagtgctgatcgccaagggcgtgaagttccttcgcgacggtgccgaggctgacaccgccctgaaggacatgggcatcgacgacaacctgctgaaccgcctgcgggcgacgcaggacaaggtcgtgcgctggggcgcggacggcaagctggaagcagtggacccgcgcaacgtcgatggactggcggatcggcaggcatggctggcgttctacaacgcgatcaaccgtggcacctcgcagattcttcaggacaccttcatcggcgagacgggaaagtgggcgcacaacggctggctgaagatgctgttccagcaccgcacgttctcgctggtcgcgcagcagaagcagctgggccggtacgtgggcaactacggtgcgtggcagactgcgggcctgatcgctgcggcgatggccgtggctgcgccgctgcaagccctgcgcgtgctgtcccgtgtggccctgatgaacgatcaggagcgcgaggaggccatcgaccagaacatcctgtcgcccctggcgctgggcaaggccacgctgaactacgtgtcggcgacgggcatgctcaacgacgtgctggacgttggcaccggtgtggccggcgggtggtacgaatacgccaccgacacccagggtccgacgtggctgaagcagttggccggcgggcagttcggtaaccgcaaggaggtgatcggcgggcagttcgcgccgtctctaggcgtcatcaacgacttcgcccagggcatcgccggcaagccggagaacctggcggacgtcatccccggcggtcgcctgcccatggtgatcccgctgctgaagggcgcggccagccagtggaaggaggagtgagaatcagggccaaggacggcccacccttttggtacacctacagctaataggaggcagcatggcagttccagacccgcagctgcgctacgcgacagacgtgttcgacgccgatggcgtgaccactgactggcagatcagctttaccggtggctacatcaacccgtcccacgtgtacgccatgagcggactgttggacgaagagacccagctgctgaccgatcggaccccgcacaccgtggaagtcctgagcgaggacgatgacgctagtaccgtccgagtctcgcctgccgtcgccgctgggcgtaagctctacatctaccgcagcactccggtgcagcagatgctcgttgactacgttaacggtagcatcatcagcaagaccaaccttaacctcagcaacgaccagctcctgaagatcatccaggaaatgttcgactcgctcaacatcgccacccttagcatcgaccagcaggtcggcgtgatcgtggacctgaacgagatcatccagaacatctacaagcaggtcaccgagttgctggccgctggcggcatcgtgtctgtcaccccgcgcgtctggtccggttcatggaccggcgaccaggccggcgacaccgacttcgacatggtgggcgcggacgtgtccggcgccggcttctacgacgtgtacgtcaacggcatcggcatgcagccggacgtggactatcaggtcaccctggcggacggtaccgatcccagcttcatccgcttcgccacggttcccgccgaggggagcatctggttcgccgtgcttcgtggttacgccaagccctacaccgggccgccgccgatcaccgctgcgagccttcgggtgccgatcatcccggcagcaggcccgacctactacgccgacaaggctaccgagtacggactcgtgcgctgcacgtatgccggaggctgcaccgtcaacatcaacctgatccccacagtgggcaacggtgagacgaagctcgcccctggcagctacttcagcgtccagcagaaggcgggtccggtggtcatcaccggcgatgcgggtgtgaccctggaagtaccggtcggatgcaccgccgcaactcgcggcaccaactccgtcgtcacggcaacgtgcatcgacggcgacaccaacacgtggttgctttcgggcgacttggctaaggagtaagcatggctaatcacttcaggctgtacggccgaccgctgatggcggacgaggttgtagatggcctgtcggtgacgggcgtgctggaagggtacacggcgggcgaggcttacacgtctcgcctgtccatcaacaacccagtcggccgctgcaccgtggaggtcatcgaatcgacgctccctgcgggcgcggtagtccgagtggacaacatcaccaaggaagtcgtcgtcaagtgggcggctttcactgaagtcctggacgaggaaaccctcgtgcctaacggcgacttcgaggcgggcgacgacggaacgtgggtgcctggcggcgcggagaatggcgagggctggtcgattggcactggctccggctacgacaccgacggcggcgcatacagcgcgcgcttcgccaacatcaagacgagcggcagcgacctgctcaacccgctgattcccgccaaggtcaacgactacatccgctgcaccgccgaagtcaaccagggcgcaagctcctcgggtaaggcaggtgcacgtgtgtcgatcatctaccggagggaggatgggacggagctgcaacgcaactccggcaacctcgtgaagtccggcagcggcggcgcttggcaccagtcggtcgccgagggagccgcacccaaggacacgaagtacgtgcagattatgctgtctgcattccgcagcaagcagaacaagccgctgtgggtggacaacgtcaagtggaaccacaagtacgtgctggggcagaacgacgacagttcctacttcctgagcatcaaggtcaccgacgggttgaaccgcgtggcctactggtccggccgtatcgaggagcagggcatctacgttacgtcgaagctctacagcttctaccagacggagtctttcctcggcaccagtgggttcgccgggtactccaacagggacatgcagactcccttggaacagttcctctgcggctcatccttcgttggctgggaaattcgcagctcgcgtatagaggtggacgccggggcagaatcgttctcctgcaccagctcgctggtcggctgggagattaagagcatccgaaaggagtacgctgtagaaacccccgagtctgttcgtgttcagtcctcgttccattccttcaacctgaagcagcatccggtagtgaaccagccgcccgacgcggccgcacttgtccggtctggcttcgtctcatggagtttcgcatgatccaaaacaagctcggagttgccgggttcttcaccattagcaaaggcaagtcgctcgactcgctgaagacggtggcggactggcaacagaacctcattaccaacagcggcatggatgcactcggcggcaccggctacccgatcagcctctacgaaatgatcagctacctcgcagttggtagcggtagcgcgactccggcgttctccgacaccgcgctgggtgcggaagttgcgcaggtcggttacactacccaaaacaacggcggcactaccaccgcaccgtactatgcgtacgcccggatgcagttccagttcgcggcaggtacggcaaccggcgtgctctccgagctgggtgctaagcgctacaacaacagcaccggcacgtacatcctcaccacccacgcgcttattcgggactcgggtggtagccccaccaccatcaccgtgctcgcagacgagatcctcgtggtcacctacgagcttcgcctttacgtggacaccacaccggtggttaccacccagacgatcaagggcgtaagcaccactgtgacctgcaagcctatcgcgcttagcaccggcgccatccagggagccggcgccgtcgcttggaccaactacgtgtggggttgctactacttcatcggcggcaccggagacggtactggcgcaatcaccgacgccacccctccggggaccaacgtcagctactcggatttgtctacccagcatatcgactatgtgcccggtacttactaccgcgacgtcgtctgtcggctctcgatcaacaacgttccggatggccctatcaccgcagcgatggggatgtcagggtgcatcccgttccaggtcgggttcagtccgggcgtcaccaagaccggatcggaaacggccaacctgcgcatgcgggtttcgtggagccggtacacgccatgatccctactgtctcccaaagcatccaacgtggtgactgggtagagcagcagaatcggcgcacccgcccgctcatcgacttcgagcagggcgggctggtactcaacgcatcagtggataacctccaagctgcgctgtggaccgccgagagtgacggcagcagcgtcgtcgtttaccgcgacggcgttgccccggtcaccgtgctgacagactccggcatcacgcagatcgcactggcattcgaccagaccatgcggccgcacatcgcctacatggcgggtggcgcctgcaagttctactggtacgacacggtggcaggctcgatgcagaccatggtgatccccggcgcaaccacgccgcgcctgtgcctggacgagaagcgagcgatgttctccactcagagcgacgtgctactgtcgtacaagaacgggagcaacctgtgcgtccgcgcgcagcgagagcgcttcgcaaccgaacacgtgatcgccaccggaatccccggtgagctagtcgcggttggcatgaacaacgtcaaccgcctgcaatggaaactcgtcggcaaccccgacgactggccctaaacctacaggagaacagcatgaccccgccgagtgtggtcaatgaggtcgtccgaacctcgccgcttacgctcggcgcggtctacctcaacttcatcagcacgtatggtgctgccatcgtaactacgctcgccatcatgtacgctgtcgctcagttctactggcgcgcgcgcgagcaccgcaagatcatgggagggaatgatgtcgaacccagcaagtgagggcgcgctcggcgcactccacgaactcgttgccgtggtactgaaggagcgcctcgccaacggcgagctgtgcaccgcagcggacatcaatgccgcgatcaagttcctgaaggacaacaacatcacggctacgcgcgaggccaacaaggcgctcggcgaactggaagacgaactcggcaagcactcgctgccgcaggcggacgatgacgagttgcagagagcactcagcaacatcgtcaagtttccggggagcgtagccaatgcgtgaatcagccgaagcggcagacatccgtcgccgcaagttggagctgttgcagaaccactaccggcacttcgccaccttcatgcgagacatcatgaaggtgctggggttcgatccgacgtggatgcagtacgacatcgccaactacatgcagtacggcccgcacctcgcaatggtgcaggcacagcgaggcgaggcgaagtctaccatcgccgcgatctacgccgtcttctgcttgatccacgatcccacccaccgcgtgctgatcgtatcggcaggcggtacccaggcatccgagatcgctacgctgatccagcgtatcatcctcacggtgcccacgttggagtgcatccgaccggacaagaactccggcgaccgcaccagcgttgacgcattcgacgtgcaccactcgctgaagggcatcgacaagtccccgagcgtggcgtgtatcggcgtcaccggcaacctgccgggtaagcgagcggacctgctgatcgccgacgacgtggagtccaacaagaacagccgcaccgcagccaaccgcgagctgctgctgaccatcacgttggagttctccgctatctgcaccggcaagcccggcactccggggcgcatcctgtacctcggcacgccgcagaccggcgactccatctacaacaccctgcctgggcgcggctacgacgtgcgcatctggcccggccgctacccgaccccggcgcagcgcgagcactacggcccgcatctggcgccggctatcgtgcagcgcctggaggccgaccccatgttggcgttcggcggcgggccgatgggcgacgaggggcagtgcaccgacgagctgttggccggagagcagaagcaccagtccgaactgcggcagcgtggaccgtccagctaccagttgaactacatgctcaacacgcggctcatggatgcgcttcgcttcccgctgaagaccgagaacctcgtggtcatccccggcggtggcgaccgctacccgctgacgatcacgcgcggcctgagcaatgctcaccagcgcgcgttccagtccagcggctacggcttcgtcatgatgatgcctcacgagatgagcaccgagactgcgcccttgcagggcgtgcacatgcagatcgacccggcgggtggtggtgccaacggagacgaaacggcgttcgccgtgaccgccttcctgaactccaccgtgtacgtcctggccgtgggcgctgtgcccggcggctatgacggtgacggcctgctcgaactccgccgcatcgcggtgaagtacaagccgaacgtcatcaacatcgaaaagaacatgggctacggtgcgttcgccaaggtgttcctgcccgtgctgcgagaagaccgcggtaccgagacgggatacaagggcgacatccgcgaggagttcgtgaccggcaacaaggaagcccgcatcatcggcacgctcgaacctgtcatggctcgtggctcgctggtcatgctggaatccgtggttgagatggatcacgagtacacccagcgctacgcatccagcggcaagcgccaggtctacagcctgttccaccagatggcgaagatcacacagcagaagggcagcatcgcacacgatgaccgcctcgacgcactggaaggcagtgtgcgccactgggttgcgcagcttgcactggaccagaacaaggccatcgtcaagcagcagcagcgagagttccaagactggatcaacgatccgaccggcatgaaggcagcgacccgaaagagtccgctccaacgtggccgtccatccctactcgaccgctaccggaggtaatgtggcgaacaagcttatcaacatggcagtacggaccagcacttacggtgctgagctactcactgccgaaaactccgccgccgcacgagtgctcctcggtgttaccggcggaggtggcggcggcgaggtagcctctgtcaacgggcaagttggtgctgtggtactggactacgcggatgttggagcagcctctgctgcccaaggcgcgaaggccgacacagctttgcagccgggtgacgcagttggcgcgatcagtagcgtcaatggcaagaccggcactgtggtgctcaccgccacagacgtgggtgcggccaccgccgcccagggtgccaaggcggacactgccctacagcccggagacatcccagctcagtccgtaaccagcgtcaacggaaagaccggtgcggtcaacctcgtcccggccgacctgggtgccgctactgctacgcagggctcgaaggcagacagcgccgtgcagcctggacagctcgcaacggttgctacatccggcagctacaacagcctgacgaacttgcccaccttgggaactgccgcttcgcaaagcgcggcagctttcgcgagtgctgctcaaggtgctgctgctgacgcggcacttcccgcagcactggttcccaccggacttgtcgttgggttgtccttgaagtacgcgagcgcgactacggttacggtcacagcggggtcggcttacatcccgggaacagggttggtgtctctcgcatccgactccaccatctctcccggactggcagccagtgtgtggcgacatgtctaccttactccttccgggtcggtcgaggcgtctgctacagcaccggctgcgccgtatgctggtaccgctcgtactaagtctggcgacaccacccggagatacctgggtagcatcaagaccgacagctcgggcaacatcgtaaagttcttgcacaacgccgcaaccggtgcggtgaagtacctttacgacatcaacacggcgcccttgtatgtcctgtctgccggggtggcaacgagtaacaccgttgtctcttgcgcagcagccgtccctctaacctcccgcgtaatgtatgcattcgcagaaaacgtggcagcctcgggtgctttcgcctacatagctaacccggatgcggggcctgctggtccgaccatgatcttggagtttctgcgcgccaacttcatcatgttcggagagctggtgctagactcttcccagcaattcaactactcgcgtaacactgctgacaccggcggcctctccgtctggtgcacaggctacacatacgaacgataaggagcaaccatgctgaagtccgacttcaccagcaactacaccggcctgtacggccgcggcaactacctgcaccgcgaactgctcgccctcgtggagcacgcggagaagcaccccgcaaccgccgggcagctgctcgcccagttccagaaggactcgacccaggtgctcaacgccctgatcgcggccggtgcgcgcacgcagtcctcgggcccgaactccggcccgcacaccccggtcgatctggacccggacgacaatccgctggacccataggagcaaccatgaaccagcagcagagcaacaaggggctgttcggcctcgtcggtggcatcttcatcggcatctcggcaacgctgctgtcattcacccagggccacgaaggggtacgctacaaggcgtacctcgacaccggccgggtgccgaccatctgctacggccatacggacggcgtagtgatgggcatgacggcaacggagcaacagtgcgacaagtggctgatcgaggatcttcagatcgcccagaagggagtgcgcaagcacctgaaggttcccgttaaccgcaaccagatcgacgcctacacggacttcgtgttcaacgtgggcgagccagcgttcgcgaacagcaccatgctccgcaaggcgaacgcaggggaccgcgaaggtagctgcaaggagttcctccgctgggtctacgtcggtaagctcaactgccgactgtccagtagccggtgctccggcatccctaagcgacgcgacgcagagttcgccctctgcatgcgccccaacaacgaggtgatccaaccatggaaaccccaagccaagtaatcgcgcggcttagcggtaaggctatcggcctgctgctggtcgtgaccctgttcgtgtgctccggtctgtacgtctacggcctgcaacgcaaggtggagaagctggaaactgcccaagtcggcacgaccgctaccgccaaggcggctcagacccaggccaccgggtacgcaacctacatcaaagagaaggaggacgtgcgtgtacgcactgaagaagctctcgacgccgttcccgagtaccgtgacggcactgttcctgctgatgtcgctgacctcctgcgcgaacctgccggttcccagtgatgatctcctgaaggactgccatatcacctacctcggtggtgagcgtggctcctcttccagccaggacaaggtggtaaagctggcacaagaccgccggatggacaccgttctgtgcaacaaggacaaggctgcgctgcgtgcgtggaaggccgaggtgtgtggcgtcggcaagcgccggtgtgtgcaggacaagtgacatgacgactatcgcatgggacgggacctacgtctacagcgacagccaagtgacctacggtagtgctaagggcaaggcggttaagatattccgccttgtctctcccgatggtccagttgttgctgcgttctgcggtgagcggaacatcatccacgactgcaaactagcaatcgaagcaggccgcagtctagacaagctcgtcggtaaggagtcatccgtgctggttgtcggtaaggacgcagcgttcctgacctctgagggtaagacctggagggtggatgcgcctctcttcatgggcagcggcatggacttcgccgaaggagcctacgaaatctgcaaggatgcccgcaaggcggtcgaggttgcgtgtcgtaaggacttgtacagtagcggaccgatcgctagggtcaaggctccgaagtaagccggaccaaaatttgcttcggaaatgcgcgggggtcactccaataagagctcccgcgcgtgcccccgtacgccctcgcgttacgcgcctgggtgtgcgtgtgggcgtgtgcctgcgtgctcgtgcctgggcacgggtgcctgcgcctgcggcgcgtgtgcgcgcctgtgcgcctcacctgcgggcgcgagacgatgcacgtgggtgtgtgcctgtgtgtgcctgcgcggggcgtgtgcgcgtgcctgggcggccgtgtgtgggtgtgtgcgtgtgtgggcgcgtgggtgtgcctgggcgggtgcgcgtgtgtgggcgcctgcctgccttggctgaatggttaacaattctctcgccgtgaggtgttgacgtggccgcctgggtgtggtccaatggcctcactgggcgccgggaagggccgcaggagggccgcaaggggctggacaggtacacacctaccgggtaccatgcgaaccgctgctgtaggcgtgtgtgggccatctgtatcgtttcgcctcgtttcgacttggtgtgatcgacggttcggccttttggtacacctacagctgagaggtccgatgccaagctgaacgccgacgtatcggtaccctgtcgggatcacagtaagctactgctaggctaaggttgacgcttgctgacgcaagcagtagacacagccatgcaatgtaggtaagctgaccgggagttgagtgaccaagctattgagtaagatggtgggaagccctcgggccgacgacaagagcaaccatcctatagctatctgagtgtgatgcgatgagctaacacgatgacacttgacagtaagcccacagtgagctatgatgcgggccaggtggtagagccaacggtaaggcggctggatcaccagtaaggagcggaccaccggctatgatgaggtgggatggtggcgacaggacgcccagcgggttagagacccggcagtcaagataggcaaccatgccgaggcttgacaagacagcaccacggtgctag

SEQ ID NO: 30 - DNA, 44443 bp, Bacteriophage Xfas301
  source 1..44443: mol_type = unassigned DNA
atgtgcgtgttcgcaccgaagaagctctcgacgccgttcccgagtatcgtgacggcactgttcctgctgatgtcgctgacctcctgcgcgaacctgccggttcccagcgatgatctactgaaggactgtcacatcacctacctcggtggtgagcgcggcacgtcttccagtcaggacaaggtggtcaagctcgcgcaggaccgccgcatggacaccgttctgtgcaacaaggacaaggccgcgctgcgtgcgtggaaggaagaagtgtgcggtaccggcaagcgccggtgtacgggtgacaaatgaccaccatcgcatgggacggcaagcacctgtgggccgatagtcaggccacgcagggcgaccacaagcacaccgtgcgcaagatcatgccagtatcgacacccaccggccctgtgctgctgggtgtcaccggggatttcacagtgcttcgcccggttctcgctgcgcttaaagcgggcgaaggctacgaggagcacgttggcaagtccgcgacggtgcttgtggttaaggacggcgtactcacggtcactactggcaagcagcagtgggtcgaggaggctccgtacttcgatggtagcggtaaggcgttagctctaggggcgtatcatgcgagcaagtctgtggctaaggccatggctgccgcgatagctcacgacgtgtacagctccgggcctatcgtcaagctaaaggcacccgttcgcaaggcttagtcataaggccacgtggatagccgaccaaaatttgcttcggaaatgcgcgggggtcactccaatagaagctcccgcgcgtgcccccatacgcccgtgcgttacgcgcctgcgggtgcgcctgcctgcgtgctcgcgtgtgcgcctgtgtgcgcgtctgtgcgcccgcgtcaaggttccgcgtgggtgtgtgcctgtgcctgcctgcgcggggcgtgtgcgtgcgcctgtgcggccgtgcgtgtgcctgcgtgggcgggtgcgcctgctgcctgtatggctggaccgtgcctgccttggctgaatggttaataaatctcttgcagattgtgcttgacgggtggccgggagtgtggtctactggcgtcactggggcagcgacagggcttcaggagggccgcaaggggcttgacaggtgcatacctacctgctaccatgcgaaccgcagctgtaggcgtgtgagggccatctgtatcgtttcggccttttggtacacctatagcacacagtgccgtcgatcctgaacgccgagctatcggtactctgtcgaggcatgaagtgagccacccgctaggccaacggttgacaccggccctgcaacgtggtaagctgattcggaagtcgagtgatgtaggccgtagtggcgctgccaacaagcgagctaagggtacatgggtgctactggaacgggatgcgaggagctaccgaaccacacttgacagtaagccgacagtgagctatgatgtaggcaagtgatcgagccaacggtaaggcggctggaccacctagcaagacaacgtaggcgctgccctagccggacacacgatagggcttgacaacgaaccaccggtgagctaacataggcaccacggtctgaggaccaccggcaatggaccgggcaggactaccgctaacgggtagggtgtaacgggaagcccttacgggtggaccgccaagctgcaacgtagcactagcggataaccggatgaactgggatgtaaaaggcccatagaatccaccagactagcaacactggtgccgctttacctagagctaacgtctagggtcagcatctgccgtgagagtcggccacgctgataacctactgccaaggtaggaagccggtcataagcgggtggtgagcctgctatcgaggggcatacccttcgtttcgtgaaagcttcgggatcggccacggtgacaatggcactgctagccggagtagggttgacagcccgaagggctagcagattgatgcacactcacggtctaagacacgcaccgctttaattgccttgacggcagcggggaggacagttacgaccgttccatcgcaactggttaggctaccggttgttgcgaccggccctagagtgtgcatcaatctgttagttttcccaccagtgccaatggaggcacacatgcaaggctcgaccaatgccaatctggaacgcacccgcaccaagcgccgcttttgccagttcacccggactgcaagcgtgatggacctgcggactaccgagcatgaccgcaagctcgccgagcgtaagcgccaagccgaacgatacgaagcccgccacggaaccgctggaaagcgatctgtgtttgctgtcgagggcaacagcgggaccaatcgagcgaaccacgccgctgatcggagggcctacctgtgatccgtttctacttcgccgcagggtacagcaaggccgcgtgggaaagccaccagcgcgcattggtcgctcactcggagacacccgccgccgtctccgacctgcgatggaccggcgcacgctggacctacgacatcaccctcgccgcacctgcgatccactgaatgcaagctactgggccttcgcaagagggcctagtgtcgtgcaatcggcacggacccaacctaaagggaaccaccatggacatcatcaccggaagcgctgacatcaagcgcgccatcaagtcgatcaataccgctcgcaccaagctggtcgatcagattcagcaggccgccatcgcggtcatcaaccacgcacacatccacggcgacgttacgctcgcttccgatctgtgtctcgccgtgggcaacggcatgaagcatgaagccctgcgcctgtacctgtccgagttcggcccgatggctccgaacgacgacaaggaaaccaaggcgagcgcgcccatgaagttcgccaagagcaagcgcgtcgagggcgaagctctggccgacgtgctggaacgtgccgccgcgaaggcgtggttcgacttcaagaccgagaagcccgccgaggcgttctcgttcgccgccgacctgcacaagctgctgggccgtctggaaaaggcaaccgaggagggctacgtgccgaccgaggaggagcaggccgtcatcaacgctgcccgcgccgtcccgaagcctgccaagaaggtgaaggcgtaatgcggcccggcacccgcgtcatcggagccggtgtgcgtgggtgccgctgtctgaccgagggcaaggaatacacggtcgaggactaccagcccgcctataccgacccgacaagcgcgagcggtttcacgtggcctgcctacgtgggagtcatcaacgacgatggccgactcgcctactaccacacccaccgattcaaggagaaagccgatggaacccaagatcaacctgcgcgtaacccagcgtgaggcgtcgttgctacgctcggccctgcacattgcctgtgcgctgactgccaaggccgacccgtatgccaaccgcaagctgtccaacgagttcgccgtgctgcatggtgagctgcgcgacttcggtgtcgagagcttcgagcgtgataccatcctgaagttcgaggacgacgtgattgcagcctgccgggacagcgatgtcgaggcgcagctgctgcgcgacctgttcgctcgccctctgactgtcggctacggcatgcgtgagatggactacgccgctatcgaggcccgcgtgatggcctgcctgctcgatccgatcccgccgctggtgatcgacgcatcgcagctgccgttcgagttcgtgggcaccgtgaccggccgcagcgtgatgtccggcccgtccatgccggacaacctgccgcgcaagctgcccgacgtgctgatggacgaccagagcgcacgacacgtggcgctgaccgcatcacagaccgggctggtgaacaaggccgagccgaagggctggatcgtgcagttcaatctgcgccatggcagcatcgccctcgccaactgggcgcaggtgcgtgagctgggtctgccgcagcgcagccgcaatgcagcgtaccgtgcactgaaggcgcgggccaaggcgcagggcatcgccgaggacgcctaccgtgtggtgcctgccggtactcccgatggcccggagaaggatcgcggcttctacaccgccgagttcttcaccaagcatgccctgcgtccgcatcagcttggctggaatacgtccggcgcacgtggtctgaccggcactttcccgactgcgcaggccgcagccaacgccatcgaccagcacgtaaaggacaccggcgcatcccgcagccgctatcgtgtgaagtggcacaagaaccgcgcgtgatctaccgctgcgccttctaacgagggcgtagctttggaaccacgcccaacaggagggcacattgcatgatccccgtaacttacaagcgcatccgtagtgggaagcgcaagccgatccagctgtgcgagaagccgcgccagtggaaggagttcgtgacccatgagcacagcgtggagcgctggtatgcgtgaggtcagcctgcgcctagtggtgaaggcgctgcctctcgttaccgtgaagggtgtagctgtcggggattacatcctcggcggccaccacaccagccacgaagcgtgcgagcaagccatcgcacaccaccgcaagcaccacgagaaggtgcccaccctctacaccgtagaggaaatcgaaatcccacccgtcaatgaggagaaccaccatgcgtaagctgtacttcatcgcttcgatcccggccaccgcgaaggatggcgtcatcactggcgtcgtcgccaacggtacgggccgcaaggccaccgccgaggaagtgaccacactggtcgagctgctgcgcaccaagggtgcgtcccagtccctgctggatgcgctgcgcgatgccacctatccgggtccggtgtctgccttcgaccgccgcgctgctgcccgtgccgaggcggcaaccctgaactcgttcggtggtctgttcgtctggtccgtcatcgagctgggcgagagcgtgcgtcagccggtgcgcaagccgctgggttggcggatcaagtacgacggcgggttcaccagctgctacaaccacccgaactacaccgcgaccgtgttcatcgacggcaactcgaagaacaccagcgaggacaacgtgctgtttgccacccgagacgccgcgcgcacggccatcgagaaccacatcggtgacaagcgcagccgcaagaacccgcagggctactacatcgagccggtctatgcgtaagctctggctgcgcatcctgatcctgctgtgctggatcacaggtcgtggcccgtgggttgtcgtcggccagtaccatgacgacgacggtaagctgtgccggttccgcaccggcccggcttccaccgggttctcgctgacgttcgatgacctcgacgcagccaacgactactgcgaccagcgcaactggaaggcagacaccgacccgctcggcaccacgtactacgtgtggcacgatacggagttcaaccacttcggacacaggagaaagtgaccatgggattcctcgacaagatcaagaagggcgcgcagtacatcaaggacaaggtggtcaaggccatcatgcccaagcgcgacgacgatgacaccaccccgccgcctccggtggacacgagcaactacctgcacgtcagcgtgccgctgatccccaccgacaacccgatcctgcgcaagatgctggggcaggactacttccccgtgcagaaggggcagggtcagacccggatcgtcggcaacaaccagctgaagcgcgtggccgatagcctcggtgccaacaacaaggaacgtcgcaagctgcgcacccggatgaagcgccgcgccgccgagctgcgtgccggtgcatcgttgcagccgaacgtgcaggccgcactggcaggtgcagcatgagcctgcgcatgggaagctgggtcgaggtgaccgtgcccgacagccgactgctcaacgtgcagccggagattgccgccgccgtcaagctgatcggtggtgcgacgatgaccaatgcccgtggcctgtacgtccgcaaggataccggcgcactggatgacgaggcggtgaccgtgatccgcttcgacatgaacttgcagagcgagctggtggaccagtacatgagcgcgatccgcgcaatcgtggaccgcctgctggtgctcggcgaggagagcgtgctgcgccgtcgcttctacagcatgggcggcgggtacaacagcgagctgatcttccagtaagaggaggcgcgatgcgtatcagggacggcccgacgtaacgcccaccaattattgaggatcgttgggagcgcccgcctcccttgattaacgggcaccatcactacatcaaccgtcaagaggaaccatctacatgtcgaacgaaaacaccaccgagcagaccaccatcagccactacgaagccaagcgcgccgagctgctggaagacatcgccaaggcgcaggccaaggtcgatggcctgaacgagaagctcgccaagctggatgccgtcgaagccaacagcgccgccatcgaagcgctgtccgctggtgacgccgtgtcctacgtcttcggccgtgctctgaacaagcgtgtgctgtcgggcgtcgtggtcgccaccggcaagaacgacaagggcgtgctgcaactgaaggtgcagaccggcgaaggtctggatgccgagctgaacctgatcgacagcagcgccctgctgatgtcggccgaggaagtgctgaaggcgcaggaagaaatcgacaaggccatcgccgaagcgcaggctgctgccgctgccaaggcgcagggcgaaggcggtcagtcgtgagccggggcagcaccagcccggcggtgccgccgaccagcgcgccgagccgcagccagttcaccgcaggccgtgacctgaaggtcggcttcaactaccgggccatcagctccggtgctggtgaagtgatcgacggcgacacctacctgctggtcaccaacgtgaccgacaagaagggcaatcgtcagctggtcaacaccagcaccggcgaggtgtccttcgccacgcccggctccatctggagctactgatccgacgaggatagcatgagcgatacccttcccgacaacgactggctaccacacgccgagcgcctgcctgttggtggccgcacccgagtggcccatgagtgcggggagggtacgcccttgctgattactcgtgagcatgacaagtccaccgcattctgtttcaggtgcggtggcacaggattcaagcgtgagcacgagagtatcgaggccaagcttgcgagaatccacgccgagcaaacgagcgagcgcagagtgcgcgcaactgttgagttgccagagccacgggtatacgacacccgcgagtggccgctcgacgctaaggtgtggttcttcaagatgggactctcgcttcagatgatcgagaagctgcggctgtactggtgcccaagcatcgggcgggtggtactaccgatcactgaaggcgacaacgtggtatactggacagcccggtcggcaacgagacagccgaagtggctaacacctgacgttccgaaagacggacttgtcgcacgctacggcgtgggcacaggtgacaccatcgtactgtgcgaagacccgctcagtgcatacaaggtgggactggtaaccgaagcgtggtcgttgctcggcacgaagctgcacaacaaagtgttgaagcagctgactgatcgaggccaacgtgtagcgacgtggctcgatgacgacagaggtagaagcaacggtagcaatcccggccaagacagcgcgcgagtaatcgctgcgcgtctacgtgcgtttggtctggactacaggaacatcacgtcaccacgtgacccgaagtattacacgaccgactacatcaaggagaagctgcaatgagcaaacccatcgtgcgctaccggcgcgctatcatcccgcctgtcgttggcttccgtgccacgctcggcggcgtgcttgcgcatccgaacctcggcgactgcgacatcgtgcacacctcgacggtgctgtacgtgacagacggcgggcgcaagttcgagacacgcaacacccggtatcaccagctcgattcaaagtacgaacccgaaggagaacctgatgagtcttgacaccacgctgctgcggttgtgcaccaaccgtggcaagttcgaccggctggtacccagcgcaccacgtgatgggctggacgagctgaccgtgctgatgctcgatgcgttgcgtgcgtactacaaggagttcccggacacgaaggacttgccgttcgatgtgttcgatggctgggccatggagttcaagtggaagacgcagcccgacgacaagaagtccctgctgaaagttctgctgaagcagatgcgcgagccggtcccgcccgaggcagagcagggcatgatcgagaagctgttggagttggagcttgccaccactgcggtcagcaagatcgtgcagtggaatggtggcgctgagttcagcctgcgcgacgagcttgccgggttggctgagacgatcaccgaccgcatggatcgcaaggcccgcctgccgctggtgcaggagacgcccgaggaactgatgcagatggacgagcacgacatcggcatccacttccgactgcccacgttggcccgcaacctgcgcgccctgcgtggtggtgacttcggcatctacgccatgcgtcccgacgcaggcaagaccacgttcctgaccagcgagtccagccactggatcacgcagctcgacaacgtgtggcccgaccagaagcgcaccggtatctggctcaacaacgaaggtccgggcaagcgcatcaagcagcggtggtatcagtcgttgctcggtgctaccatccccgagatggtggagtgggcgaaggacgggagcatccgcaagcggatcgaggatgcaatgggtggtgacctccaccgcatgcagttctacgacatccacggattcaactccggcgaagtcgaagccatcatcaagcagaccaaccccggcttcatcatcttcgacatgatcgacaacatcacgttcaccggaggcatgaccaacggcggacagcgtaccgatcagatgctcgaagcgatgtaccaagccgcccgtaactggtgcgtcaagtacgacgcagtgggcgtggcgacatcgcagatcagcgccgagggtgagggcatccagtacccgccgcagtccgcactgaaggacagcaagacgggtaagcagggtgcgtgcgacttcatcatcatgggcggcaagctcaacgacccggcgatggaacgcttccgctacatcggcacaccgaagaacaagctgcaccgcgcaggcggtaagcgtgacgttcgtgaggaggtgatgatggatgccgagcgcgcccgcttctatcaggaggcagcatgagtcagacgaaagtggaagtgcacgggcaccgtgtgttcttgcccggcatccagaaaggattcgacacggtgtccagcagtcaggccaactacctcgcgtccgtcgtgagggatgcggtcaacgctgcatacatcgaaggacgcaacgatgctccgcagtggaagtggggatggttgcgcaacaagcacagcacatggatcggcgtgcactactcgccgcacaacaagcgctggtgcatcaacctgatcccatgcttcacgctgtggatcaccaagcccggaggtaacacaccgtgagtaccgagccgaacatctacctgccgcgcaacgtgggcgtaatcacgtccagccgcaccggcagcagctacaccgtcgagcctgccgtgaccgacacggacatcgacttcctcgtgctggttcaggatttccacgaggccatcgccaagctggtcgagcagggctggaccttgtgctctggtgctgacgggcactacgaggaagacgaggactacagcgacacgtggtacgctctgcgcaacggcgtgttcaatgtcatggtgactgccgacagtggctggtatcagcgcgcggtcgaggccaccaccatctgcaagcgccgcaacatcaaggacaaacaggaccgcatcatcgtgttccggtgggtgcgcgatgggctggacttggatggcgatgcgtcggatgaaatgtaccagcttgccctgcaacggtggccgctgtgagcttcacttccttcgacctcgaaaccacgatccgttccatcctgaagcgcaaggccaatccgttctacgacatgaacaagatcgtggcgattggctacaagcgcaagggtgacgcacggaacaccggcctgtactacgacacccgcatcggcatcgacaaccagtacatgggcggcgcacctgacgggtggctgcgcgagctgtgttacgggcagcagttcctcgtcgggttcaacatcaagttcgacatcctgcacgccatctgccaaggcccgctcaatcggcaggcatggatcgagttcatcgacggcggcggcatggtgtgggattgccagcttgccgagtacctgctgcacggcatgacgcaagagttccacatggcgagcatggacgagacggctccccgttacggcggcaacctgaaggacgatgcagtcaagtccctgtgggctgcgggagtggacacctgcgacatcgacaagacgctgctgatggattacctcctcggcaccaacgacaccgacgacgtgggcgacatcggcaacaccgagaagatgttcctcgggcagctcgccgccttccgtgcacgtggtggtctgcgctcggcgctgctcaacatgggcgcgctgtgcttcaccatcgaagccgagtacaacggcatgtacgtggacaaggaatgggcgcttgcgaaggcgaaggagttggaggtcgagcttgcaacagcgacggctgaactcaacggcttcatccccgagttgcccgagggcctgaccttcaactggaacagccgcttccacaagagcgcgctgatcttcggtggcaaggtgaagtacacggccaaggttccgatcatgtccaccgagggtgggccgacctacgtacagaaggacgaggtgcactatgtgctggtcgatggtacaacgacggcgacgccaccggccgaggacttcgacaacctgtggcggtacaccacctacggcagcggcaagaacaagggcgagtacaagaccaagaaggtgaaggtcgatgacttgaccaagcagaagttccgcaacgaggacatgctgttcgagttccccggctacaccgagccggatgctgcgtgggaaagcaagagcgatccgggtgtgtactccaccgccgccgatgtgatcgaggcgctgggctatcgcaacctgccgttcaccaacgcactggcccgccgcgccgacatccacaaggacttgtccacgtactacatcacgacggacgagaagaccggcgagcagaagggcatgctcacgctggtgggaccggatggtatcatccaccacaagctcaacatgaccaacacggtgacgggtcgcctgtcatccagcgatcccaacttgcagaacgtgcgcaagggtgagctggacgaggagacgttggaggagaagggttctcagatcaagcgcgccttcgtgtcccggcacaagggtggcaagatcatccagtcggactacacctccctcgaaatctacgtgcaggctatcctcaccgagtgccgtcagctgatcgaagacctgaaggcgggcctcgacatgcactgcctccgtgccgagcaggcgtggggcgagcagggcaagtacgactacgacttcatcctgaaggcgagcaaggacgacaagcatcccgagcacaagaagtggaagaagaagcgcggcaacgcgaaggtgttctccttccagcgtgcatacggtgcaggcgtggcgaagatcgctgcgaccaccggcatgacggaggaggaagtcgaggcgctggtgcgcggcgaggccgagcggtacccggaactgggtgcttacatcgaccgcatggtcgaggccatcaagcgcaaccgcgtcagcaccaaccgcttcgttccgcaccccgacgccggacggcagggcgtgcctgctgggctgacgtgtcagctgggccggtcgcactggaccacgccggacggcaagatgtattccttcagcgagtcaccgtccccggtgttcatcgccaacaagcccgcgagcaagggcggctgcgcgcagtcgttctcgcccacggaaatcaagaactacccgatgcagggcaccggtggtgagtgggccaaggcggcgatgtacgtcagcctgcgcgccttctaccggaagtacgtgaccgaaccgaaggagtggttgggccgtgcgttgctcgtcaatcaggtgcacgatgccgtctacgtggatgcacatggcgacatcgcaaccaaggccgctgctctgctgcacgcctcgatgctagaagcgtcggtgtatatggagtggtggttcaactggacgctgccgcttggcgtcccgtgcgaaaccaagatgggcgacaacatgatggaggagaagaatcctcccgcagagttcgccggtctggtcatcgagtaccgagcgtcgatccgcaaggacttcgtaggtaatcacaacccgtcgtttgaataaggagaacaacacgcatgagtcttgacgcactgttgaacaaggtcgccacgcagggtaaggaccagtcggtcgccagtggtggcaacttcgactacaccccgcccgctgccggtgtgaccaccgcccgcatcgtcgggtactacgagctgggcaagcacgagttcgagttcgagggcaagaagaagacgcaggatgaagtcgccatcgtgttcgagctgaccggcaagcagcacccgcacatcgagacggacaatggtccggtcccggtgcgcatgacgctgacgctgggcctgtccaccaacgagaaggcgcactacttcaaaatcttcagccgcctgcgcaccgaggagcgccacttcgtgcagctgctgggtcagggtgtgctgctggaagtcatccacaagccgggcaagcgcgacccgaacaagaccttcgccgagatcgacaaggcttccatccgcaagccgatcatgccggtgccggaaatggagaacggcatcccgaccggcaagttcgtggacaccgtgatcccggtcccgcagcagatcaccccgctgggtgcgttcgtgtgggacttcgccgatgccgaaatgtgggacagcatcttcatccccggcgagtacccggagcgcaaggacgagaagaccggcaaggtcacccacgaggcgcagtcgaagaacaagacgcagctgcgcatcgctgcggcgctgaacttcaagggcctgccgtgctacgactacgccgctgccaagttggcgggcagcaccacggtcaccaaggaaggcgtcgatgcgctggacgaagtggtcggcgacgtggcgaacgctgcgcccaccgacgctgctccggccgacgacaagccgccgttcccggtggacggtagcgacccgatggcaggcatcgcctgatggacctgagcgctctcatggctgcggctggtgagcgctccccgatgccggtacaagtggtacgtcaacacaatccccgcgtgatcgctcacgtggatggggactacatggcgtacttcgcggctggtagcgagaactgctcggcgggggatgcacggcgcaacgtgctctcccgctgcgcacagctgaagcatatcagcggagcgggtaagatcgtcatgcacctgacgcacggcgcatccaccaagggtgaccgcttcctcgctgctaccacgcagccgtatcagggtcagcgccaagcaggccgcaagcccaacaactgggcgttccttcgtgagtggatggagacatacgagggcgacgctttcactcccaaaatctggctgacgcgagaagccgacgacggcatcgcatacgtcaacgagggtgcagcattgcaccacaacatcctgcacgtggtgcacagcgccgacaaggacatgcgaatgttctgcggcgtgcatgtagactgggaaggctacggcatcaccgaggttccgctcggcgcttacgacatcgtgggcgagaacgggttgcagtacggtcacaagtggttctggatgcagatgctccacggcgacaccgccgacaacatccccggtctgccgaaggtaggcaaggtgacagcggagcagctgcttctcgacacgaaggacaacctcgaagcggtgcagctagtgagcggcaagtacagcgaagtgctcggtgccgactggcgcaagacctttgccgaacaggccgtgttgctgtggatgcggacggatcgtgacgctgaactgctggacgtgctgaagctcgacgtgttcgggccgcagctgaagcaagcattctacgacctcgccgaggacgtgaacgagaagcgcgcaatcttggaggcatacaaagcatgaagcgactcactgcaacgcaggtcaagctgttgcgcatcaagctcgcagcggagcaagggaaccgatgctgtctctgtcagggacagttcggcctgaaggctccgctcgatcctgtgctggaccacgaccacaagaccggcgctgtgcgcggggtgctccatcgcggatgcaactccctgctcggcaaggtcgagaacaacgcaggccggtatggcgtgcgcgatgtgttcgcattctgtgcgggcatccccaactacctgcggtcccacctcaccaacatcacggggtacctgcatcctacctacaagaccgacgacgagaagcgcatcgctcgcaatgcgaaggcgcgtaagcggcggtcactcaacaaggagacaccgtgacccttacccagttcattcgccgagcaccgaagcgcggcccgaagattctctgcctcgacatcgagacgttccccatcgagttctacggctgggggatgttcaacaacaacttcagcgtcaagcagatcaagcgtgactggtcgctgatgtcgttcgcttgcgagtggctggacgatgacgagtcgttctatatggaccagcgcaacgtgcgtgatgtcttcgatgaccgcaagcagggcaaggcactgtggcacctgctcaacgccgccgacttcgtgctagctcgcaacggcaagaagttcgacctgcgcaagatcaaggcgcgcctcgccatcctcggcctgccgcccgtgtcgcccgtgcaggtgatcgacccgatgctgctgaaccgcaccgagttcgccttcacctcgcagaagttggagtacaccaccggcgtgatcgtgccggagctgcgcaagtacgaccaccacaacttccccggcttcgacctgtgggtggcctgcatgcagaacctgcccggtgcgtgggacgagtgcgaagcgtacaaccgcatcgacgtgaagtccatgaagttggagtacaagaagctgcgcggttggtactcgcagcatccgaacgtcgccgtgtactacaaggccgatggcagcgagcaccgctgcaacaagtgcggctgcaacgaaatgatcccgcaggatgatccggcccgcacacaggtcggcacgtacctcctgcttcagtgcaccgtgtgcgacggctacagtcgtgggcgtaagctgacgaccagcgccgaggcccgcaagcacatcaccgttccggcataaggagccgacatgaagatcaccgacatccgcagcggcatgcgggtacagtacaccggaaatgcgcccggcctgatcgggcggcgcgggaaggtaagccgcgtgttcgctaaggatgtcgaggtcttcttcgacggacgtgtgagcgcgagctactgcgttcccgattccctccgacagcttatgagcatcggaggtgtgaccaccaccagacgagaggtacccatgcccgaactgaactaccgcaacgaggacgagcgcacgctgtccgaccgtggcgtcggcctgaaagatgacggcggcaagccgcaggctcggctgctgcatgagggcgtgcctcgtgcactggcccgcgtcatcgacaccttgaccttcggggcgcagaagtacaaggcgcactcgtggcagcatgtcgagaaggcgctcgaacgctatcaggatgcgagctaccggcacgacaacaagcgctgcctcggcgagaagctggacccggagacgggcatccatcaccgcgcgcaccacatcatcaacgagctgttcctgttggagttggaactgcgcgaggaggagcaggcccgtggcgcagagtaagggtcgctcgatcaaggaggcgtgggtcaacatcgccatcgggtacagcatcaactactgcgcgaacatcgcgttgctgccgctgctgtggcatcccgaacacccgcttatgtcggcccacgccatcggcgtagccttcacgcttatcagcttcgtgcgccagtacatcatccgccgctggttcagcaagggtgactgatggcctgcgcccgctgcggccaagtgcaccggtacgtcccacatgaggccgagtgggcgcgcttcctagaggagcatcgtacccgcaagcagttcgatgtcgagtgggccaactcactctggcatcgcacataccctgacgacgccttctgcattcttgtgatgaagggccgcgcaggtttcgttccattcccgtcgaaggagaaatgaatgctctacaagaaccagaccgccatgcttatcaagtcctacgagaacaccgtggcgtggggcgagagtgccgaccacgaggaggcgttgcagaacgcggtcaaggcgggcttcccgaacctgccggaagaagatcaggccgagctgtatacccgcatcgccgatgcgtgggaaggctaccgtggttcgctcgctccgcgcaagctgtggatcggcaccatcgtcaaccagttcatgtcgtcccgcatcgcacggttcaacgccgcactgggcgatggcagcaagaaggaggacagcgccgatgtttgacatcaagcgagataacgtgcgggtcgctcccggctacaagaagcgcaagcgcggcttcaagatcaaccgcgccttcaccaagggcaacttccgggtgacgtggtacgacggcaaggccacctactgggagcagtacgtgccgtggtacaaggtgccgctcgccatgttccagatttggagggaccacgcatgagctacatcgtccacaaggcagtcgagcaggacaagatcaagaagaagctgcgtcccaccgaggagcagctgcgcaccgagtacatcgcacagcccaagtacgacggctgcaacatggtcgccatcaagcgcggccactgggtgcccaccgtgaacaagggcctgcacgccatcaaggtcggcgacgtgcagatgcagcccgtggatcgcggcgtggtggacctgttctcccgcaccggcgagcaggtggtcagcgcgcaccacatcgagaacgctctcgcttccgcaccgttcttcccggtcggtgtctacttcggcgaatactggcacccgaccatcgaccagcccaccgtcagcggcatgttccgcaagaaggacggcacgcagtacaccgagccgatgttcgtggtgttcgactacgtgacgctggaagaatgggagcagggatacagcgacctcgtgtatcaggagcgcgtcagccgcctgccgagcatgggccacgccatcgccgagggtaccgctcccgtgttctacgccgagtcgcagggcttcctgatcgaccaagagctgggcagcatggaggcggcgaagctgctgtgcgagggtggagcatacgatggcctgatcctgcgcaagccgagcggcaagtgggtgaagggcgacaagggcacgaacggcgaagtcgtcaaggtcaagcccacaatcacgctggacctccgcgtcgaggacatcggcgtcgaggttggagagaagaccggccgcaacgtctacaccctgtgggtccgactgccgaacggcaaggcgcaggaggtgggaagcggcgtgccgcaccatggcaacggtgttccgaaggtcggcgacatcgtggaaatcgaggcgatgtcgtacagcaagttcggtctgctgcgcgagccgcgcttcaagggaatccgctacgacaagacggaggctgaccaatgagcaacgtcaagaccgaggtgtggcacaacatggaacgcgacacagtggaggtgcgagtgagcatcccgttccgcgagtacgccggttccttgtggccgaacgagacggtgcgccatgcggtgatcgaatcgctggatcgcttcctcgccgagcggaggggctgatggacattcgattcggaaagcccgagctggatttcggcggtgatcgcttcgctccctacggtggaggtcatgtaaccgtgactgccactgcgtggtgcggcaccgagcagttcttcaaccgtcagtgcatcccgagctacgaggtcggcggcgacgcatggccgcacatcatcaacgaaatgcacaccgcactggtctgcatgatcctgaagcgttacccgccgacggacttcaccatcaagcaacggaggtagcatgctctcgcaagtggaactcgaactggaaacctacgccttcggtaaggagcgcatggagaagtccatcgcccgcaacgaggagaagggcggcgcggacaacaacccctacgcccaagcagtgtatcgccggttcgtgcttccgcttgcggagcgcatccgtgcggacatcgactccccgcgcatcggccgcgcccaagcgcacgtgccacttctgcgcgccaagtacgatcccgagcgtcagaacaagcgtggacaggccatcagcgccgaggaacaggcccgcgagtggtacgaggctgtggccttcgtcgccgttcgcggtgcccttacctcttgcatgcgtgacaagcacggcgaaggcagcgaccgcgacgtgctgaagaacgtcggcatcaacgtgtaccacgagtacctgctgacgcagttcgccgacgcagagccgacgctgttctaccacctgatgaacgacatggaccgcaagctctctgtcaacgagaaccaccgcatgacggtgatgaagatgcagggtcgcaagaacggcatcgagttcgtggagtgggggcaggcgcagcgcgatcaggtcggcgcgtacctgtgcgaccagcttgcacagctgggcatgttggagattggcgtagtcaccgagactgcggccagtgccggtgcagcgtaccggaagttccagaccaagacgcacgtcaagatcgtgctgaccgacgaggtgcgcaagctgattacgcagatcagcgacttcgtgatcgaggccacgccgttctacctgccgtgcgttgagccgccgatggactgggtggacatcgacaacggtggattccacacgaaggaaatgcggcggctcaatccgtggatggtgaagacctacgctcagacgcgcgacgagtaccgcgccgccgagctgcgcaacgagatggctgcgatcaacgcattgcagcgcgttccgtggcgcatcaacaagcgactgatggaagccgtgtcggccatcgccaaggtgcacgacatggaggaaatcatttcgcagggcgagctgccgaagccgcgaaagccggagtggttgaccaaggacatgaccaaggaaaccatgtcccacaatcaggagttggagttcaagcagtggaagcgcgacatggcgaactggcacaccgacgagcgcctgcgccagaacaagggcaatcgcttctacaacgcaatgaaggtggcgcgtaagttcgctgagtacccgagcatctacttcgtgtacttcgcagacttccgtggccgcaagtacgttcagaccaccggcgtgtcgccgcagggttcggacttgcagaaggcactcttggagttcgccgaaggcaagcccttgctgacgaaggacgcgcaggattggttctgcatcacgggagcaaaccgatggggttacgacaaggcgtcgttgccagaccgagtgaagtgggtgcgcgagcatcacgaccagatcatggccttcgctgcggacccggtgaacaacgacgagtggaagacggccgacaagccgttgcagtttctgagctggtgcatggagtacgagcagtggcaagtgttcggggatcgcttcctgagccgcatcgcagtcgggatggatggttcgtgcaatgggcttcagaacttctcggcgatgctgcgcgacgcagcaggcggggtggcgacgaacttgatcccggcaccgctgccgaatgacatctaccagatggtcgcagaccgcgtgactgcgatcctgctgggcgaggaggaagacgccgaagggtaccgcacgctgtggctcaaccatggcctgacgcgctcgctggtgaagcgcagcgtgatgactctgccgtatggctcccggcagtcctcgtgggcggacttcatcatcgaagactacctgaagtgcggcaagttccccacgctcgacaaggccctgtacggcccagcagcgcgcttcctgagcaagcgcatgggtgaggccatcgccgacaccgtggtcgccgcagcgggcgcgatggagtggttgcagcgcggttcgggtgcgatcctcaaccaagggtacgaccgcatccggtggatcacgccgtccggcttcccggtggtgcaggtgtactgggaatccgaggagcaccgcatcaacaccaagctgtgcggtaacgccaagctgtccctgcgcaagagcacggacgcggtgaagaagtcccggcatcgcaacggcatcgccccgaacttcgtgcacagcctcgacgccagccacctgacgctggtggtcaacgccgccaaggccgaggggatcgacgccttcgccatgatccatgacgacttcggcacccacgccgccgacagcgcggccctgtaccgcatcatccgggaggtgttcgtggcgatgtacgagcggcacgacgtgctctcggccttccactcagcctacccgttcctgccggagccgccgccgatgggcgagctggacctgcgccaagtccttgattctccgtacttcttcagctgacggagtttcagtacacctatagcacacaggccaaccgaggtccggttggagcggccgcgattgtaagcggaaccggtgccggaccttttggtacacctatagcacagaggagacaccatggccgaagacgccaaagtgaaagtcctgatgacgctccacccgaaccagcttgccgccgtgcggcgactgtccgggctgtcgctgtccgtcaactcgaataccacgcccttggaggcaggtatgcagttggggatggcccgcgtcctgaacatcttacaggagggtttcaccgttgatacctccgtaccgaacaccaacgacgggtgatagtgagcagatcaaggcggctttaacggccgctttgtatctgtcatctagagaagatagtaaggtagacaacagagagtcttctgtaagctacaactgtgatgatcctgattatacagtagctctgataactcagaacttagtagatgcagtcatcatagatgaagcctacctgctatgctttgccattgtcacaccgtggtattccaagaaccgtactacgttcgttgagaacatggtgctgcgcattgggccgggcagttccttcgaccggtacatagccgtgatggaacatctggctgacatcaaccactgcgactccctgagcgcaggcggtgcactagctcggaactcccgagcactcacacggatgtatgcacgctacggctacctgctggaacggcatgctccccaattcaccaagcgaaggagttaacctatgggtagcatcgttggtggtgggtctgcaaagaaggctgcgctgaagcaagcggcggctatcgacaagcagaccaacctccaaactcaatccacgaactaccagattcaggcgatggccgatcagatggcgcaggcagctgcacagcaggccgcatccgagtacgccgagaagttgctgagtgcccctgtcgataccgtcgatgtgcgactgggtacttctgacctcgacttgcagaccgccgacctgatcggccgacgcaagaccgcccgctccacctacacccggcccgtgaccacgaccgcagcttcccggctgacgaccgtggccgggtcagacctgttgtgaggtgagcatggaccattcgatccaaaccgctcaccgccagttcgaggcttacgacaacaagcggcagggcatcatgtaccgactcgaacgctattcgagctggaccgtccccaagctgttccctcgcaagaaccgcgatcaggacaccgagccgctgacccacgggttccagtctctcggcgcacaggcagttaaccatctggcgaacaagctgatgatgtcgctgttcgcaccgtcccgaccgttcttccgattggagctgaagcgcaaggcgaagcaggctgcgcaggaacagggcgcggacttgcaggccatgcaggcaatgcttgcgaaggccgagcaggacgccagtctcgaactcgacaagcgctcgatccgctcccgactgtacgacctgctgaagatgctgatcgtgctgggcaacgccctcatggtgttggagaaggacacgatccgcgtgctcaacatgcggcactacgtggtcaagcgcactcgcactggcgaggtctacgaactgatcctccgggagaaggtgcacaagacccagctggaacccgccgcactcgctgccattgtcgcacacccggacttcaagcccgatgacgacggcatggtgtgggagtacaagtgggtcaagctggaccacaagaccggcaagtacaacgaagacgtgtggatttgcaactgcaagctgcccgcaaacttctcctcgacctactccgcagacaagctgccataccgggcggtgagttgggacttggccgcaggcgacgactacggctccggcttggtcgaggactacgaggcagacttccagtctctctcgatgctgtccgaggccgcagtgcagggcgcgatcctcgcatccgagttccggtggctggtcaaccccgcaggtcagacctccgtcgaggacttcatggcatcgcccaacggcgcggccatccccggcatgaagggcgacatcgagctgattaacgcaggcgtcgatggcgtgctgcaaaccaaccaagcaatccagtccacctacatcaaccgcatcggcgcaggcttcctgttgcagacggcggtgactcgtcaggcggaacgtgtgaccgcgcaggaaatccgcatggtcgccgaggaactggaaggcgggctgggtggcggctacagccgcatcgctgcggacgtgcaggtgccagttgccttttgggtgatgaacctcacgggccgcgacatccgaggcaaggacttggagcctgtcatcatcaccggcttggccgcgctctcccgaacgggtgaccgtgaccggctgttggagttcggcagcaacctcgcaaacgtcctcgcgctgccgccgcagattctcgaacgactgaagctgtccgcgtggatcgccgacctcgccgccgctggtggcttggacccgaacgtatacgtgctgactgaggccgagtacggccagatgatgcagcagcgtgcgcagcagcagctggtcatgcagaacgcatcgcagcagatcgacaacgccaacaacatggagacacagacacaatgagttccaacgcacctccgggcggtggtcccggcgcaaccgtgatcgcaacctcgcacggcaaccagcccgccccggcagctccggctccggctgacgacaggctgctgcccaacggacagcccgcaccggctgcaccggcacagcccgcagctcctgctgcgcctccggctgctgacgctctgagtctcgaacccgctgctcccgcacagcccgccgccccggcgaacgctgcgccgactgctgtgtcgattcccgactacggcgacaacggcctgaacatcgcggccgaatacttcgtcaacaccgtcggcctcgacatcgacagccgcgaactgaccgaagcagcgcagggcaacttcgccctgctggaagccaagctggaagtcctcggcgataaggccaagggttccgcaccgatcctcgctctggcgaaggagagcatcgctcgtgtcaccgccgctgcaaccgcagcgcatgccgcgaacgttgctgctgtccacgaagccgtgggtggcgcagagaactgggctgcgatccagcagttcgcacgggccaacctgcccgccgaccaactgaagcaggcaagcgaatcgctgtcggctggtggcttcggcgctcaggcgaccgcgcgttacctgatggctctggcacaggccaatcccgcgacgaccgtcaagggcgcaccggctaccaatgccgccgctcctgccgcgtcgatcaacggcgtcgctcctctcacgaaggagcagtaccgcgctgagtaccgcaagctggttgccgagaagggcatccgtggtgcggcccactccgaagaactgcgtgcactcaacgcgcgcgtcatccactaagaaccaaggagcaacataaagcatgagcaccatcttcccgaccgtcccggttctgccgaatcaggtcaaccagtccggcaacgagaacgcgctgatcctcgaacagttcaccggcgatgtcgagcacacctacgtgtccagctcggtgctggaaaagttcttcccgcgcaagcaggtcaagggcaccaacaccctgaccaagaaggccatcggccgcaccaagcttcagaagctgaagcgcggtgatgcgccggacggcaccccggtggacttcagcaaggcgtcggtgaccgtcgataccatgctgctgtcgcgtcacagcatctggcagctggacgaaatcttcaccgacatcgacacccgcaaggaaatcgccatcgagcagggtcaggaaatcgccgagttcgtggacctgaccatcagcatcgccgccgccaaggccgctgctgccacgcagtcgatcttcacccgcaacggccgcgcgccggaaggccacttcggtgccacgcaggtagtcctgtccgctgccggtgacgagaacgatccggccaaggtctacgccgccatcggcaagctgttctcccgcatggaggaggagaagaaggtcaagccgcagcgcgacggcgtggtcctgatcgtgcgtccggcgatcttctacctgttgcagcaggccgagcagatcagcaacggcgagtacctgacctcggacggcaacaagctgaccggcatcccgaccttccacggctggggcgtcccggtgctgtcgagcgagaacctgccgaacaccgtgatcgaaggtcacctgctgtcgaacgacgacaacgacgacttctacgacggcgacttcagcaccctgatcgccgtggccgtgtcgccgaaggccctgctgatcgccgaagcgctgccgttgcagtcctcggtgtggtggagcgacgcctcgaagtgctacttcgtggactcgtggatgtccttcgccgttggtctggatcgcgtcgagaacgcgggccgcatcgacaaggttgcctaatccgctgggcgcggtccctgaatccttcgggtaactcaaaccgcgcccgccttccaccaacacaggagcaccatcatggtctttgaccgaccgttcgagatttccaaccgcgtcgtcgccgctaccggcgtggccggtctgcccgacaactccgtgggcaccgtcgtcggcgtccactacgacgccatcggcgcgggctgggtcgtgcgcgtccgtttcgttgacgacgaaatcggctcgcaggacgtggagtacgcaccggcctcgctggctctggctgcggactaagcaacatcccggcaggggcgctacggcgtctctgccttgttcctctcaggagacaccatggcattcatcaccaagctcgacatcgtgaacgcctgcatcaagacgatgggcgagacgaagctcaacactctggaagatgaccacgtatacaaggacgacgcagttgacttgatcgaccgcgtgcaccgcgacgtgtcgtcgctctcgctgtggttcaacaccgaatgggtggagctgaaaccgcaggcaacgagcaagtacatcatggtcccaacggacgtgctgaagctggactgcaacccgagccgattcggccacgtggtgcagcgcggacgccgcctgtacgaccgcaagcgcaacacctacgagttcgaccacaacgtgcaggccaagctggttcggctgctggacttcgatgacctcccctacgaggtgcagatgttcgtgcgggacgacagcgtgctgcgtttccagtccgacttcgacggcgacaacaccaagtacgccaagatcaagcagcagcgcgacgactcgtggatcaacatgaaggccgagcatatccggcagatcaaggcgaacccactgttcgcgcgtgcgtccgtggacgtgctgcatcagcggtacttcaactacagcggacacccgtggcatagccactacactttccccggctaaggaggcaacatggcaaaggcaggcggaacctatcccgacatccttcagggtgtcagtcagaaaccggcgcaccgtcgtcggccgggccagacgcacgagcagatcaacgtgctgtccgatccggtgaacggccttgtgcgccgtcgtggtacgcggttcgctgcttcccaagccgttgtcacctcggccgagctgcgcaacatggacgtgttcgacttcatgcaggaaggcaaggagtacgcgctgctgtatcggcgcgatccctctacctcgggaagcgagacgttcgcgttcctttacaacaagacggacgaggcgttcatcccgctggtctacgagaacagcacgtgggtcaacacgctggtcagcggcggcgcgtcgtcgctcgcggccatcggcagctacgtctacatcgcgggcaacaccacgatcccttcggccaccagcacgaacgtgtggcaggagcagacgaacatccagcgcctcgccgcgtgggttcgcaccggcaagtacaacacaacgtacacggtgaacctgacgcgcacggacaacacggtgctgacggttacgttcaagacggtgaccgcatcgtaccccggcacgctcgacacgagcgacatcccgttctacctgcccggtggcacggagccggacccggcgtatcagaagtacgtcaacgaccgagtgaacgagtacaactccgcagtcaacgagtggatcgtgaccagtgccgagcagacgcgcccggagtacatcgccgagcagctgtcggatttgctggtggacgcgggcgtggcggctacccacatcaagggcggcatcatcattgacgacgaccagttcaaggacatcacggttgacgacgagggcgacggcacgaccttctacgccgcagggcaggagattaccgacgcgacctacgctgtcaagttccactggcacggcaagatcatccgcgtgcgcccgagcggtgcaggcgcggacgagacgtactacctgcgtgccgagttggagaacggcgagacttcgggctacggctcggtggactggtacgaagcgcccggcgtggagtgcaccatcgacaacctcgtgtcgcagctctacatctacaacggtgtgggctacatcgcacgcaacggcgcgggcctcacgtctctggctccgggcagcggcgagcacccggcttacggtgcgcgggttgcaggcgacggactgacctctccgatcccgtggttcatcgacaagccgatcaccatgctgtccgtcttccaagaccggctggtggtgggcgcgcagaactacgtcaacgcctcgcggtcggcggactacctgaacttctggcgcggctctgccgtcaccatcgaagacagcgaccccatcgaaatcttcgcgcatggcagcgagggcgatgtgctccggcacgccacgctctacaacggcaacctcgtgatcttcggtgaccgtcagcagtacgggatcagcggcgactcggtgttcagtccgaagaacccgcttatcaaggcgttcagtgcgaacaaggattcggtggacgcgaaggcgcagacctcgggcaactacatcttctatgcgcagtacggcagcgaaggcacgagcctgcaccagatgcgcgtcggtgcgctcaacggtcagcagacggtgacggacgaaatgtccaacgagctggactcgtggctgtccggcacgccgttgcagatcaccgcgctcactgccccgaaccttgtgatgttccgcacccgagagcacccgcaggacttctacctgtaccggtacgaggacaacaagaacaacgggcagcgtatcgtggactcgtggtcgaagttccagtaccacccggcgctgggcgaaatcatcggcgtcagcagctacaagaagaacggcctcgtattcaccgcacgcgggtcgctggtggcgtgcgacgtgttcgacccgaagggcgagccggactcgcatgcgtgcctcgacagctgggcgagttttggtacacctacgggcgtactgaccgcgagcgcaagcatcgccgtcaatagcactagcccgtacttcctgctgggttgtccctacgctcaggcgtcggacttccttagccagttcgatgacctcgatgctggtgcgctggaatacggcgtcgtgtctgaggcgctggtgatcccgaccaatccgttccctcgggaccagaacggtcaggctgtgctcgatggccgcatgtcgctgaacaaggtgacggtggacgtggagaacacggcgggcatgctcgctgcggttaccacccgcaacaacagcgtgaccaccacggacttcgagggccgcatcctcggcgactccgacaacctgatcgcgcggcaaccggtgtaccgggggcagctgaacatcagcgtcgggcgcgaagtgcgtgagtgcacctacgagattcgcagcaaggattggctcccgctccgggtgaccggcctgagctggacgggtcagactttcaacaatgtacggagggttagctaatgggttcggttaatacgatcctgcaagcgaacaacaccacccgcgttgcccgtgcgaactaccgtgcagccgttgcgcagaccgacaacacgaaccgcagcgaggtcgccaagaccggcttcgctgatttcatgcggtccctgaagaacaacgcccagctggacgccgccgcgaaggagtacaactccaacatggaggcgctgtccgaggagctgcgtgcacgccaaggggctgggcttaactcccagctccaactggcgaacgcgcgcggtgcgcttcaggcacaggccggtgctgtaggtgtgggcggctcgtccgcagacctgatggataccatggttcgcttgcaggcggaaatggacaaggagacgcaggacaacgcagtctcgctgctcgcctctcgcggcgcatcgcagacggcgcaggtcatgtcgcgcgcgtggaatgggatggacatgagccgcacgttcggccagttcgactactcgcagcacatcgagccgaaggcgatgaagcgtcgcttgggcaagctgatcggcgtggccgtggctacctacttcggcgggccgatggcaggcgaggctgtggcagacttcgcagtcggcacgtggcaggcggacaacggcaacttccaaggcatgtcgcagtccttcaacaacgcagcgcagaacgggatgcaggcgtggcagcagtccaatgatcgcggcggcaagtcgtgggcgtccactaccttcgggtacaacgacggcaccggcaagcagtccgtgaccggggcgaaggtcaccggcaacttcggcaacaactacgacaacttctccaccactacgtccggcctcggctggttcgacagtggcagcggaggcaactcaggaggcgcatggtaatggctgacatcggcacggttaccttcaacacgcagtccgcattgcagggtggcatcaacgccacccccgcactgtcgggcaacaccagcattcaaggcgctggtgtgaatcaggtcggccccgttcgctcgggatcggattggttcgagagcactggtggtatgacgatgccggacagcaacctgcccgagttcttgcaggaactggcagcgccgaacaccgccaagctgaagcagcagcagatgtgggacggcttcgttgccgcccgcgctggtaagaccatggacgagattgctgcgaccgagccgtggtacaagaaaatcttcggcgacaccaactacgagattggcgcgagcatgtataacacgctctcgcaggtcaacgaaatggagagcgacctgctgcggcgtatgccggagttgcgtaagcttccgcccgaggcgatggcgaaggagttcaacgacctcgccactgcccggatgaccggcaacggtttcgcggacacggtgttgcagaagaccttcatggatcgcgcgggttcgctgatggacctgcacacgaaggagcgcacggcgtggcagcagcaggagctggtgaaggcgcagtacgctgcgaactcgtcggcgtccactggcttcaacgaactggcgaagcgcacggcgatgctcggtaccaaccgtcccatggacgagaaggccaccgaggcgctgacacaggcgcagctgtcgttgctcgacggtctgtcgccctcgcgttaccagacggacgagtcgtacaagtcggcgatcaccgcgttttaccgtggcgctgcggatcgcggcgagttccacacgctgaagttcctcaacagcaagggcgtgctgaacgccatcgaccccgacgggcagctgggaatccagcagtacgtgaagcaggcgcaggatcggtaccgctcggactggctcgatgccaacccggagcaggccgagaagatggcgcttgtctccatgtacgcatccgagggcattggtgccaagccgtcgcaggcgatgatcgaggaaatgaacgcgacctacgccgctgagacgggcagcgatgcgccgctctactcgggcacgcagcttgcttcgatcatggcgcagtccgcaggcgcgcacatccgcgcgcaggaagccgtcatcaaccagcgcaacgctgcggctaaggctgcactgactgaccagcagaagctggcggcgcaggaggaggacatccgtggcggcatcgagtcgttcaagcgcggcacctacgcgcagacgatcaacatccccggcgtggacaaggagctgatcgaagcgaacgtggtgcaggcgtggaactccacgatggccgcgaacccgaaggtcgccatgtcgcagctggtgtggaacgccaacacagggcgcggcgctgtgctgaagggtgtggccgatcagttccagaccacggcgcgcgctgtgctccgcgatcagccgaacacggcagcggctgcgctgtaccagcagtggaaggaactgaagcagacgaccgctgcgcgcatcgacacgaacggtcagcctgtgcagggccgactgactggcgcaactaccgccgcgctgtacttcggagatagcgtcaacacgttcttcaacaagctgcaagcgttggagaatggcggcgtgaacttcgagcttgcctacgaggtggcccgtggagaaatcaccaccgacgatcccacgcagttcgacgcgaacagtcgtaaggaatccgaggctactcaggctcgtgttaacgacgctatcgcaaagctcaaccccaagtacctcggtatgttcggcaacaagctgggcgactctggccgcgctgcgtatgctcgcgccatcgtccggtcggtcaccgacagcggtgggctgctggacacttctgcggaaggcttgcaagctgcggctacccacgctaagctggcctacggtctggaagacgcgggcaagtacgcatgggagaacggacgcgacgacgaaggccgagtgatcggcggtgttggtgcgtggctggggttcatggacacgaaggagacgggaccggccatcgagaaggccatcgacgcagcactgcggcgggtcaacatcgagcctactaccagtctgaaggctgacgtgttccgcatgaaggacagcgagaacggcgagccggtgctgtacgtcaacgctgttggcgagaagggctggaaggttgtgccggtgtacgggcgcgacatcaaggccgagtacgagaagcacacgaagcagcagcggcagttgcaggccccggtaccgcagggctacgttcgcatgaacgacggtacgattcagcagagcatttccatccaacccaaactgtaaggagatagacaatggcactcgatctttcggggctgacccaagaccagcagattgccaaggctgccgcttatgcgggagtgccggagtccatcgtgcgcggtcagtggcgagtagagtccggcaacggacgcgcagccaaggacgctgacggtgtgatccgcagcaaggcaggagcgcagggcgacttccaagtcatgcccaccacgcaggcaacgtgggaagcgcgcaacggtcgcaagtacgacatgcgcaacttccaagacagcatcgagctgtacgccgacatcatgcgcgagaacatgcagcttgccaagggcgacgttaccaaggcgctgcgcatctaccaaggcggcaccaacccgaagaactggggacaggagaacgcagcctatgcaccgagcgtgctgggtggcgcatccgctcccgccgtgtcggcgcagccgcgcagcctgaccaccactcaggcagacctcaacgccgcgtggcagggcaacccgaacatgcgcgaccgcacgtggtccggcgcttccatcccggatgcgtggaccggtgctcccatcgaaggccgcaacgctctggcgtcggcagcgaaggaacacatcggcaagattcgtgcgggcatcgccgagctgtcgatgggtcaggtggcgcaggaaggtggcaccgcagagcaggctgtgggcaaggcgcaggccgtccgtgcgtcggatcaggtcgtgccgtggtgggtgcgtcaggaagtggacgtgctgaataccggcgctcgcaaggcgctgctggatcagaccgagcaggctctcgcacaggagcgtgcagacgaggagctgcgcaactcgctgaccttcctcgacaagtggggcgcggcattcgacagcggcatcggtgcggctatcagcaaccagcttgcgcgcgaggacgagaacatcccggaaggttggaagtacgacccgaaggaatgggagaagtcgtggatgaccgccgacgaactggaagacatccgtgacgctgcgtactcgccgaacgagctgaagtacgtgagcgaccgccagtggatgcgccgcaactccatgcgcatcaaggatcagcagaccggctggtcgagcttcggctacgacctcgtggcaggcttcaccgatccgggcaactgggctatcggcggcgtcaccgctgcgggcgctaaggtgctgggcgtgggttcggctgcgctggtggccgaggggcgtgtgggtgcttcgctcgcatctgccgctgcggagaacgcggtaggctccgtcatcacggacgccgctctggtgggcatgggcgagcgccgcaacttcgcggactttatgaccgacgctgcgttcgctaccaccatcggtaccgcaatgcacattccgggcgttcgctcggctgcgcagattcgggacaaggctaccatcgacctgtccgcaggcaacgctgccgcttacggcgaagcgtggtcggctgacctgaaggcgcgcgcggtggccgagcttggtgacaacgccaacccggtgctggtcaacaaccgcatccaccagcttgccaagcaggaagcagtcgattggctgcgcgctggtatggctgatgtgccggacgacttccgcatcttcgcgcgtcccgacgtgcaggagacgaccaccaccgcaggcaccactggtgcactggctcgtgacgtggacaacgtggacgcctcgaccggccggtacaacgacagcgtgggtggtcgggtagatcagcatgatccgctgctggaacgtgcgtggaaggccgcaggcatccgtggcggcaacgtggacggcgtgctgaagtatctggaatccaacgcctcgatcccagaggacgtgcgtgctatcgccaatgcgctgaagcgcggcggtcgcctgagcacggtgaagatcgtgccggagtcggaactcgacaagtggttcgccggtgccaacatgggtccgggtatgcgagtggccggtggctacaacgccgggctggacgcgatggcgatgcggaactacacgccggaagtggtggtgcacgaaatgctgcatgctgccaccctgcgtgagctgcgcagcaactcggtgttcggtcaggaaatggaagaactgctgacccacatcaacaacagcatcggcagtgtagactccacgctcaccaccgctgcaatggagacgcgcatcaaccagccgcaggcaggcttcctcgccaacaccgacgagctgatttcctacggcctgacgaaccgcgccgtgcaggcggtgctgcgtcagatgcctgcgccgggcaacacccgcccgaatgcgtgggagtggctgaaggacaagatcgcgcgagtgatgggcctgaagaatcaggagtccgctctcgaacgtctgatgtctgtggtcggcgacaacctcggtgctgaagtgcgcgacacgcaggcatcgacccgacagactcgtggcatgctcgccaactcgatcttcaagtcgaaccgcgagcgcaaggcgttctatcagcgcactggtctggacaagtccgtcagcgacgacgcgatgcgcgtgcaggttgccgaggtgatggcgcgctctgagcgcttcagtgccaagtacggcatcgacgcggcgaagctgtccaccatcatgcagcgcttcgggctggaagctacgagcacgaccctgatgtcgtccaagtcgccggtcgctcgtatgcttgctgtcaccctgttggagaacccggagggtgcggcaggccgacacagcacggcggcgatggatcggcatggccggttcgagtcgttcatgggtacgcgcccgcgtcagtgggaagcggcctaccgtctgtggcgcgcggacgttcgcggcatcggtgcgatcaaggacttcgccacgggctggaaggcacgtgcggacttcgagtacgcagtgaagctgtaccgcgagactcgcttcaacggtggggacatcccggatgcgcacgaggcagtgaaggcaatggcccgtgagctggaccgtggctacaaccgcatggcagcagagcagcgcgcggctggtacggtgggcgcacagcgtctgccggaggaagacgtggagggctacgagtcccgcacttggctgggtggcagcatcgctgctgctggtccggttcgccgtgagggtatccgtcaggcaatgcgcgatcagttcgaggtgatgggcgagctgtatggggacgacttcctcgacaagttcgctaccaagtatctggaacgcatcgagcgcaaggcggcgggtatcatcgaagcgccgggtcaggtcttctcggagtcgcaggcggacacgctgcgcgatactctgcgggcgatgtcgctcaacgaggaggagattcagaaggtgatgggcaagtacagccgtggcggtgcgaagcacaccaaggcgcgtatcgacctcgacgtgaccaagcagtacgaagatgctgatggcaagttccgcctgatggactacctcgacaatcgcgtgatggacaactaccgcaagtacgcgggccgtgttgctggtgacatcgctctggcgaagcacggcatcctcggtgatgcaggcatcaacgtggctcgcgaagcaatgcgcctgaccggtgcgactgacgtggagctgaaggcgttcgagcaggtgatgtccgagttccttggtcgcccggtgggcactggtgatccgactgttctggcgaatgcgcggctgctgacctcggctatccagctgggcggcgcgggcatcaatcaggcagcggagtacagcaacggcctcgccgctgttggtgctgctggtgtggctgacgcaatccgtatcgctcctcgcatgcgcagcgaaatcatgcgcatcctgaagggcgaggacagcggcaaccaaatcctcgacggcttcgagttcatcagcggtcgcggcttcggcctcgccggttacgatctgcacatgttcaactcgctggacacgcaggcgtcgatgtacggcagcgagcgcgcaggcttcctgacctcgctggtgcagaaggcagcgcatgcaaaccgcatcctctcggggcagcgggctgtgctcgccgtacagcagcgcggcttcgcggaagtgctgatcgccaagggcgtgaagttcctgcgtgatggtgccgaggccgacaccgccctgaaggacatgggcattgacgacaacctgctgaaccgcctgcgggcgacgcaggatcgggtcgtgcgctggggcgctgacggtaagctggaagcggtggacccgcgcaacgtcgaaggactggcggatcggcaggcatggttggcgttctacaacgcgatcaaccgtggcacctcgcagattcttcaggacaccttcatcggcgagactggcaagtgggcgcacaacggctggctgaagctgctgttccagcaccgcaccttctcgctggtcgcacagcagaagcagctgggccgctacgtgggcaactacggtgcgtggcagacggcgggcctgatcgctgcggcgatggctgtggctgcgccgctgcaagccctgcgcgtgctgtcccgcgtggccctgatgaacgatcaggagcgcgacgaagccatcgaccagaacatcctgtcgcctctggcgctgggcaaggccacgctgaactacgtgtcggcgacgggcatgctcaacgatgtgctggacgtgggcaccggtgtggctggtggctggtacgagtacgccaccgatacgcagggtccgacgtggctgaagcagctggccggtgggcagttcggcaaccgcaaggaagtggtgggcgggcagttcgcgcccgcgctgggcgtcgtcaatgacttcgctcaaggcatcgctggcaagccggagaatctggccgacgtgattccgggcgggcgactgcccatggtgatcccgctgttgaagggcgcggccagccagtggaaggaggagtgagaatcagggccaaggacggcccacccttttggtacacctatagcaaacaggaggcagcatggcagttccagacccgcagctgcgctacgcgacagacgtgttcgacgccgatggcgtgaccactgactggcagatcagctttaccggtggctacatcaacccgtcccacgtgtacgcaatgagcggactgttggacgaggagactcagctgctgaccgaccggactccgcacaccgtggaagtcctgagcgaagacgatgacgctagcaccgtccgtgtctcgcctgccgtcgccgctgggcgcaagctctacatctaccgcagcactccggtgcagcagatgctcgttgactacgttaacggtagcatcatcagcaagaccaaccttaacctcagcaacgaccagctcctgaagatcattcaggaaatgttcgactcgctcaacatcgccacccttagcatcgaccaacaggtcggcgtgatcgtggacctgaacgagattatccagaacatctataagcaggtcaccgagttgctggccgctggtggtatcgtgtccgtcgccccgcgcgtctggtccggtgcatggaccggcgatcaggtggacgacaccgacttcgacatggtgggcgcggacgtgtccggcgctggcttctacgacgtgtacgtcaacggaatcggcatgcagccggacgtggactatcaggtcactctggccgacgacaccgatcccagcttcatccgcttcgccacggttcccgccgagggcagcatctggttcgccgtgctgcgtggttacgccaagccctacaccgggcctgcgccgatcactgctacgagcctgcgggtgccgatcatcccggcagaaggtccgacctactacgccgacaaggctaccgagtacggcctcgtgcggtgcacgtatgccggaggctgtgccgtcaacatcaacctgatccccgaagtgggcgacggtgagacgaagcttgcctcgggcagttacttcagcgttcagcagaaggcaggcccggtggtcatcactggcgacgtgggcgtgaccctcgaagtcccggtcggctgcaccgccgcaactcgcggcaccaactccgtcgtcactgcaacgtgcatcgacggcgacaccaacacgtggttgctctcgggcgacttggctaaggagtaagcatggctaatcacttcaggctgtacggccgaccgctgatggcggacgaggttgcagatggcctgtcggtgacgggcgtgctggaagggtacacggcgggcgaggcttacgagtctcgcctgtccatcaacaacccagtcggccgctgcaccgtggaggtcatcgaatcgacgctcccttcgggcgctgcggtacgggtggacaacatcaccaaggaagtcgtcgtcaagtgggcggctttcactgaagtcgtggacgaggaaaccctcgtacccaacggcgacttcgaggcaggcgacgatggcacgtgggtgccgggcggcggatcgaacggcgaaggctggtcgattggcactggctcggactacgataccgacagcggcgtatacagcgcgcgcttcgccaacatcaagacgggcggtagcgacttgctcaacccgctgatccccgccaaggtcaacgactacatccgctgcaccgctgaagttcagcagggcgcaagctccaagggcaaggccggtgcgcgcgtctcgatcatctaccgcaaggaggatggcaccgagctgcaacgcaactggggcaacatggtttcctccggcagcaacggtgcatggcaccagtctgtcgccgagggcgcagcgcccaaggacacgaagtacgtgcaggtggtcctgtccgcattccgcagcaagcagaacaagccgctgtgggtggacaccgttaagtggaaccacaagtacgtgctgggtcagaacgacgacagctcctacttcctgagcatcaaggtcacggacgggttgaaccgtgtggcctactggtccgggcgtatcgaggagcaaggcatctacgtcacgtcgaagctctacagcttctaccagttcgatgcagctatgctgaccagcagcttcgctggatacagcaacatcgacatgcttccgcctgttgactctgcgacgttcggttcctccttcgtgagttgggaaatccgcagctcgcgtcaggattacaccgccgagccagagacctcactgtacggaagctcgttcgtgtcgttcgacatccgctctatccgaaaggactactcgcctgacccggagacggcaaggctgtccagttctttccattccttcaccctgaagcagcaccctgttgtgaaccagccgcttgatgcgtctgcccagctgcggtctggcttcgtatcatggagcttcgcatgatccacaatcgactcggcgtagccggtgtgttcactatcagcaagggaaagtccctcgattcgctggaagttgtggcagactggcagaacaacctcatcactgacggcggcatggacgctatgggtgacaacggaaatggctacgcgcgcagcatgtacgacgttatcgcgtacttggcagtcgggagcggtagcgcgacacccgcgttcactgacaccgctctcggtgctcaggtggcgcaggtcgggcgcaccacgtcggacaacggcgggactactactgccccgtactacgcctactcgcgctgccagtaccagttcccggcaggcactgctaccggcgtcctttccgagctgggtgccaaggcgtacaacagcagcaacggcacctacatcctgaccacccgcgcactcatcaaggactccgcaggtaacccgaccaccatcacggtgctgtcggatgaaatcctcgtggttacttacgagctgcgtctctacatcgacacgactccggtggtgacgactgagacgatcaagggcgtcagcaccactgtgacttgcaagcccatcgccctcggccggagtggttcgctcagtgggcagtctgccatcgcgtggtcggactacgtgtggggctgctactatttctatggcggaaccggagacggtaccggcgcgatcactgaccagtatcctccgggaaccaacatcagctactcggacttgcagattcagtatgtggcctacgttgctggtagtcactatcgagacgtggtgtgtcgcatgtcgatcaacaacgttcccggtggtccgatcacggctgctatgggcctttctgcttgcgcctcgttccaagttggcttcagtccgggcatcaccaagaccggctcggagacggcgaacctgcgcatgcgcgtttcgtggagccggtacacgccatgatccccactgtctcccaaagcatccaacggggtgactgggtggagcagcagaatcggcgcacccgcccgctcatcgacttcgagcagggcgggctggccctcaacgcatccgtggacgaccttcaggctgcgttgtggaccgccgagagtgatggtagcagcgtcgtcgtttaccgcgacggcgttgctcctgtcaccgtgctgacggactcgggtatcacgcagatcgcactggcattcgaccagaccatgcgcccgcacatcgcgtacatggcaggcggcgtgtgcaagttctactggtacgatacggtggctgcttcgatgcagaccatggtgatccccggtgctaccactccacgactgtgcatggacgagaagcgagcaatcttcgccactcagagcgacgtgctgctgtcctacaagaatgggagtagcctgtgcgttcgagcacagcgcgagcgcttcgcaaccgaacacgtgattgccaccggaatccccggtgacctgatcgcgtttggcatgaacaacgtcaaccgcctgcaatggaagctcgtcggcaatcccgacgactggccctaacctacaggagaacagcatgaccccgccgagtgtggtcaatgaggtcgtccgaacctcgccgcttacgctcggcgcggtctacctcaacttcatcagcacttacggtgctgccatcgtaactacgctcgccattctgtacgcagtcgcccagttctactggcgcgcgcgcgagcaccgaaagatcatgggagggaaggatgtcgaaccccgcaagtgagggcgcgcttggcgcactccacgaacttgtcgccacggtactgaaggaacgcctcgccaacggcgagctgtgcaccgcagcagacatcaatgccgcgatcaagttcctgaaggacaacaacatcacggcgacgcgtgaggccaacaaggcgctcggcgaactggaagacgaactcgggaagcactcgctgccgcaggccgacgacaccgagctgcaagcagcgctcgacaacatcgtgaactttccggggagcgtagccaaccatgcgtgaatcagccgaagcggcagacattcgtcgccgcaagttggagctgttgcagaaccactaccgccacttcgccaccttcatgcgcgacattatgaaggtgctggggttcgagccgacgtggatgcagtacgacatcgccaactacatgcagtacggcccgcacctcgcaatggtgcaggcgcagcgaggcgaggcgaagtccaccatcgccgcgatctacgccgtcttctgcttgatccacgatcccacccaccgtgtgctgatcgtatcggcaggcggcacgcaggcatccgagattgctacgctgatccagcgcatcatcctcacggtgccgacgttggagtgcatccgcccggacaagaacgcgggcgaccgcaccagcgtggacgcattcgacgtgcaccactcgctgaagggcatcgacaagtccccgagcgtggcgtgcatcggcgtcaccggcaacctgccgggtaagcgcgcggacctcctgatcgccgacgacgtggagtccaacaagaacagtcgcactgccgcgaaccgcgagctgctgctgaccatcacgttggagttctccgcgatctgcaccggcaagcccggcacgccgggccgcatcctgtacctcggcacgccgcagaccggcgactccatctacaacaccctgcccggacgtggctacgacgttcgcatctggcccggtcgctacccgaccccggcacagcgcgagcactacggcccgcatctggcaccgtccatcgtgcagcggctcgaagccgacccgatgttggcgttcggtggtggtccgatgggcgacgagggtcagtgcaccgacgagctgttggccggtgagcagaagcaccagtccgaactgcgtcagcgtggaccgtccagctaccagctgaactacatgctcaacacgcggctgatggacgcgctccgcttcccgctgaagacggagaacctgatcgtgattccgggtggcggcgaccgcttcccgctgacgatcactcgtggcctgagcaatgcgcaccagcgcagcttccagtccagcggctacggcttcgtgatgatgatgccgcacgacatgagcaccgagactgccccagtgcagggcgtgcacatgcagatcgacccggccggtggtggtgccaacggagacgagacggcgttcgccgtgaccgccttcctcaactccaccgtgtacgtgttggccgtgggcgctgttcccggtggctacgacggtgacggcctgctcgaactccgccgcatcgcggtgaagtacaagccgaacgtcatcagcatcgaaaagaacatgggctacggcgcgttcgccaaggtgttcctgcctgtgctgcgagaagatcgcggtaccgagaagggatacaagggcgacatccgcgaggagttcgtgaccggcaacaaggaagcccgcatcatcggcacgctcgaacctgtcatggctcgcggctcgctggtcatgctggaatccgtggttgaaatggatcacgagtacactcagcgctacgcatccagcggaaagcgtcaggtctacagcctgttccaccagatggcgaagatcacgcagcagaagggcagcatcgcacacgatgaccgcctcgatgcactggaaggaagcgtgcgccactgggttgcgcagcttgcactggaccagaacaaggccattgccaagcagcagcagcgagagttccaagactggatcaacgatccgaccggcatgaaggcagcgacccgcaagagtccgctgcaacgtggccgtccatccctactcgaccgttaccggaggtaaccaatgcagaagtccgacttcaccagcaactacacgggcctgttcggccgtggcaactacctgcaccgcgaactgctcgccctcgtggagcatgcggagcagcatcccgcaaccgcagcgcagctgctcgcccagttccagaaggacgcgaccctcgtgctcgacgccctgattgctgccggtgcgcgcacgcagtcctcgggtccgaactccggcccgcacactccggtcgatctggacccggacgatgacccgctgaccccgtaaggagcaaccatgaaccagcagcagaaccaagataccagcaacaaggggctgttcggcctgatcggcggcatcttcatcggcatttcggcaacgctgctgtcattcacccaaggccacgaaggggtacgctacgctgcgtacctcgacaccggccgggtgccgaccatctgctacggccacaccaagggcgtagcgatgggcatgacggcaacgaaggcacagtgcgacaagtggctgatcgaagacctacagatcgcccagaagggcgtgcgtaagcacctgaaggttcccgttaaccgcaaccagatcgacgcctacacggacttcgtgttcaacgtgggcgagaaggcgttcgctgatagcaccatgctgcgcaaggcgaacgcaggggatcgtgaaggtagctgcaaggagttcctgcgctgggtctacgtcggtaagctcgactgccgactgtccagcagccgctgctccggcattcccaagcgccgcgacgcagagtttgccctctgcctgcgccccaacaacgaggtgatccaaccgtggaaaccccaagtgaagtgatcgcacgcctcggcggcaaggctatcggcctgctgctggtcgtgaccatgttcgtgtgcttcggtctgtacgtctacggcctgcaacgcaaggtggagaagctggaaactgcccaagtcggcacgaccgctaccgccaaggctgcgcagactcaggctaccgggtacgcaacctacatcaaagagaaggagg

SEQ ID NO: 31 - DNA, 44521 bp, Bacteriophage Xfas302
  source 1..44521: mol_type = unassigned DNA
cggcaagtggtaagccaccggaacagcggaacggttagcaccttgcggactaccggcatacatggtaggatggtggcgacaggacgcccaacgggttagagactcgaatcgagccaaggggcttgacaggaagcaaacagggtgctagtatggcaccacgctctgaggagcaccggcactggaccgggcaggactaccgctaacgggtagggtgtaacgggaagccttataggtggaccgccaagctgcaacgtagcactagcggataaccggatgaactgggatataaaaggcccatagaatccaccagactagcaacactggtgccgctttacctaagcctaacgcttagggcttcccatctgccgtgagagtcggccacgggaagtaacccactgccaaggtgggaagccggtcataagcgggtggtgagcctgctatggtagggcataccctatctttcgtgaaagcttcgggatcggccacggtgacaatggcactgctagccggagtagggttgacagcccgaagggctagcagattgatgcacactcacgttacagctaacttcccacctgacgccgcaaggtattggattgccgagggagacgactagggttgcgggtagtccctgattagctgcatcgttcgcttctatcacggcacacattcgagtgtgatagctctttgtggagtgtgcatcaatctgttagttttcccaccagtgccaatggaggcacaccatgcaaggctcgaccaatgccaatctggaacgcacccgcaccaagcgccgcttttgccaattcacccggactgcaagcgtgatggacctgcggactaccgagcatgaccgcaagctcgccgagcgtaagcgccaagccgaacgatacgaagcccgccacggaaccgctggaaagcgatctgtgtttgctgtcgagggcaacagcgggaccaatcgggcgaaccacgccgctgatcggagggcctacctgtgatccgtttctacttcgccgcagggtacagcaaggccgcgtgggaaagccaccagcgcgcattggtcgctcactcggcgacacccgccgccgtctccgacctgcgatggaccggcgcacgctggacctacgacatcaccctcgccgcacctgcgatccactgaatgcaagctactgggccttcgcaagagggcctagtgtcgtgcaatcggcacggacccaacctaaagggaaccaccatggacatcatcaccggaagcgctgacatcaagcgcgccatcaagtcgatcaataccgctcgcaccaagctggtcgatcagattcagcaggccgccatcgcggtcatcaaccacgcacacatccacggcgacgttacgctcgcttccgatctgtgtctcgccgtgggcaacggcatgaagcatgaagccctgcgcctgtacctgtccgagttcggcccgatggctccgaacgacgacaaggaaaccaaggcgagcgcgcccatgaagttcgccaagagcaagcgcgtcgagggcgaagctctggccgacgtgctggaacgtgccgccgcgaaggcgtggttcgacttcaagaccgagaagcccgccgaggcgttctcgttcgccgccgacctgcacaagctgctgggccgtctggaaaaggcaaccgaggagggctacgtgccgaccgaggaggagcaggccgtcatcaacgctgcccgcgccgtcccgaagcctgccaagaaggtgaaggcgtaatgcggcccggcacccgcgtcatcggagccggtgtgcgtgggtgccgctgtctgaccgagggcaaggaatacacggtcgaggactaccagcccgcctataccgacccgacaagcgcgagcggtttcacgtggcctgcctacgtgggagtcatcaacgacgatggccgactcgcctactaccacacccaccgattcaaggagaaagccgatggaacccaagatcaacctgcgcgtaacccagcgtgaggcgtcgttgctacgctcggccctgcacattgcctgtgcgctgactgccaaggccgacccgtattccaaccgcaagctgtccaacgagttcgccgtgctgcatggtgagctgcgcgacttcggtgtcgagagcttcgagcgtgataccatcctgaagttcgaggacgacgtgattgcagcctgccgggacagcgatgtcgaggcgcagctgctgcgcgacctgttcgctcgccctctgactgtcggctacggcatgcgtgagatggactacgccgctatcgaggcccgcgtgatggcctgcctgctcgatccgatcccgccgctggtgatcgacgcatcgcagctgccgttcgagttcgtgggcaccgtgaccggccgcagcgtgatgtccggcccgtccatgccggacaacctgccgcgcaagctgcccgacgtgctgatggacgaccagagcgcacgacacgtggcgctgaccgcatcacagaccgggctggtgaacaaggccgagccgaagggctggatcgtgcagttcaatctgcgccatggcagcatcgccctcgccaactgggcgcaggtgcgtgagctgggtctgccgcagcgcagccgcaatgcagcgtaccgtgcactgaaggcgcgggccaaggcgcagggcatcgccgaggacgcctaccgtgtggtgcctgccggtactcccgatggcccggagaaggatcgcggcttctacaccgccgagttcttcaccaagcatgccctgcgtccgcatcagcttggctggaatacgtccggcgcacgtggtctgacaggcactttcccgactgcgcaggccgcagccaacgccatcgaccagcacgtaaaggacaccggcgcatcccgcagccgctatcgtgtgaagtggcacaagaaccgcgcgtgatctaccgctgcgccttctaacgagggcgtagctttggaaccacgcccaacaggagggcacattgcatgatccccgtaacttacaagcgcatccgtagtgggaagcgcaagccgatccagctgtgcgagaagccgcgccagtggaaggagttcgtgacccatgagcacagcgtggagcgctggtatgcgtgaggtcagcctgcgcctagtggtgaaggcgctgcctctcgttaccgtgaagggtgtagctgtcggggattacatcctcggcggccaccacaccagccacgaagcgtgcgagcaagccatcgcacaccaccgcaagcaccacgagaaggtgcccaccctctacaccgtagaggaaatcgaaatcccacccgtcaatgaggagaaccaccatgcgtaagctgtacttcatcgcttcgatcccggccaccgcgaaggatggcgtcatcactggcgtcgtcgccaatggcactggccgcaatgccaacgccgaggaagtgaccgcgctgatcgacctgctccgcaccaagggcgcaactccgtccctgctggacagcctgcgcgatgccacctatcccggtccggtgtctgccttcgagcgccgtgctgctgcccgtgccgaggccgacatcctgaactccttcaatggtggtggcctgttcaactggcacgtcatcgaagtgggcgacagcatccgcaagccggtgcgcaagccgctgggttggcgcatcatgtacgacacggactacaccagctgctacaacagcatcgaagacggcgcgaccgtgcgcatcgacggcgacgaggggaaccgtagcgaagacaacctgctgttcccgacccgtagtgcggcgcgcgatacgctggacaccatcaacgacaagcgcagcaagcagaacccgcagggctacttcatcgtcccggtgtacgccgatgcgtaagctcggcctgcgactgctgatcctgctgtactgggtgatcggtcgtggcccttgggttgtcgtgggccagtaccacgacgacgagggcaggatgtgccggttccgtaccggcaacgtctccaacgacggttactgggcgcgcacgttcgatgacctcgacgaggccaacgactactgcgacacccgcaacgagcaggcacacaccgatccgctcggcaccacgtactacgtgtggcacgagttggagttcaataacttcggaacgaggaggaagtaaaccatgggcttcatggacaagatcaaggcagctgccaagtacgtcaaggacaaggtggtcgcagcggtgaagccgcgtcacgacgatgacgatacgccgccgcccgccccggacacgagccggtacctgcacgtcagcaccccactgattcccatcgacaacccggtgctgcgcaagatgctggggcaggactacttccccgtgcagaaggggcagggtcagacccgcatcgtcggcaacaaccagctgaagcgcgtggccgatagcctcggcggcaacaacaaggaacgccgcaagctgcgctcccgcatgaagcgccgtgctgccgagctgcgtgccggtgcatcgttgcagccgaacgtgcaggccgcactggcaggtgccgcatgagcctgcgcatgggaagctgggtcgaggtgaccgtgcccgatagccgactgctcaacgtgcagccggagattgccgccgccgtgaagcttatcggcggtgcgaccatgaccaatggccgtggcctgtacgtccgcaaggacaccggcgcactggatgacgaggcggtgaccgtgatccgcttcgacctgaacttgcagagcgagctggtggaccagtacatgagcgcgatccgcgcaatcgtggaccgcctgctggtgctcggcgaggagagcgtgctgcgccgtcgcttctacagcatgggcggcgggtacaacagcgagctgatcttccagtaagaggaggcgcgatgcgtatcagggacggcccgacgtaacgcccaccaattattgaggatcgttgggagcgcccgcctcccttgattaacgggcaccatcactacatcaaccgtcaagaggaaccatctacatgtcgaacgaaaacaccaccgagcagaccaccatcagccactacgaagccaagcgcgccgagctgctggaagacatcgccaaggcgcaggccaaggtcgatggcctgaacgagaagctcgccaagctggatgccgtcgaagccaacagcgccgccatcgaagcgctgtccgctggtgacgccgtgtcctacgtcttcggccgtgctctgaacaagcgtgtgctgtcgggcgtcgtggtcgccaccggcaagaacgacaagggcgtgctgcaactgaaggtgcagaccggcgaaggtctggatgccgagctgaacctgatcgacagcagcgccctgctgatgtcggccgaggaagtgctgaaggcgcaggaagaaatcgacaaggccatcgccgaagcgcaggctgctgccgctgccaaggcgcagggcgaaggcggtcagtcgtgagccggggcagcaccagcccggcggtgccgccgaccagcgcgccgagccgcagccagttcaccgcaggccgtgacctgaaggtcggcttcaactaccgggccatcagctccggtgctggtgaagtgatcgacggcgacacctacctgctggtcaccaacgtgaccgacaagaagggcaatcgtcagctggtcaacaccagcaccggcgaggtgtccttcgccacgcccggctccatctggagctactgatccgacgaggatagcatgagcgatacccttcccgacaacgactggctaccacacgccgagcgcctgcctgttggtggccgcacccgagtggcccatgagtgcggggagggtacgcccttgctgattactcgtgagcatgacaagtccaccgcattctgtttcaggtgcggtggcacaggattcaagcgtgagcacgagagtatcgaggccaagcttgcgagaatccacgccgagcaaacgagcgagcgcagagtgcgcgcaactgttgagttgccagagccacgggtatacgacacccgcgagtggccgctcgacgctaaggtgtggttcttcaagatgggactctcgcttcagatgatcgagaagctgcggctgtactggtgcccaagcatcgggcgggtggtactaccgatcactgaaggcgacaacgtggtatactggacagcccggtcggcaacgagacagccgaagtggctaacacctgacgttccgaaagacggacttgtcgcacgctacggcgtgggcacaggtgacaccatcgtactgtgcgaagacccgctcagcgcatacaaggtgggactggtaaccgaagcgtggtcgttgctcggcacgaagctgcacaacaaagtgttgaagcagctgactgatcgaggccaacgtgtagcgacgtggctcgatgacgacagaggtagaagcaacggtagcaatcccggccaagacagcgcgcgagtaatcgctgcgcgtctacgtgcgtttggtctggactacaggaacatcacgtcaccacgtgacccgaagtattacacgaccgactacatcaaggagaagctgcaatgagcaaacccatcgtgcgctaccggcgcgctatcatcccgcctgtcgttggcttccgtgccacgctcggcggcgtgcttgcgcatccgaacctcggcgactgcgacatcgtgcacacctcgacggtgctgtacgtgacagacggcgggcgcaagttcgagacacgcaacacccggtatcaccagctcgattcaaagtacgaacccgaaggagaacctgatgagtcttgacaccacgctgctgcggttgtgcaccaaccgtggcaagttcgaccggctggtacccagcgcaccacgtgatgggctggacgagctgaccgtgctgatgctcgatgcgttgcgtgcgtactacaaggagttcccggacacgaaggacttgccgttcgatgtgttcgatggctgggccatggagttcaagtggaagacgcagcccgacgacaagaagtccctgctgaaagttctgctgaagcagatgcgcgagccggtcccgcccgaggcagagcagggcatgatcgagaagctgttggagttggagcttgccaccactgcggtcagcaagatcgtgcagtggaatggtggcgctgagttcagcctgcgcgacgagcttgccgggttggctgagacgatcaccgaccgcatggatcgcaaggcccgcctgccgctggtgcaggagacgcccgaggaactgatgcagatggacgagcacgacatcggcatccacttccgactgcccacgttggcccgcaacctgcgcgccctgcgtggtggtgacttcggcatctacgccatgcgtcccgacgcaggcaagaccacgttcctgaccagcgagtccagccactggatcacgcagctcgacaacgtgtggcccgaccagaagcgcaccggtatctggctcaacaacgaaggtccgggcaagcgcatcaagcagcggtggtatcagtcgttgctcggtgctaccatccccgagatggtggagtgggcgaaggactggagcatccgcaagcggatcgaggatgcaatgggtggtgacctccaccgcatgcagttctacgacatccacggattcaactccggcgaagtcgaagccatcatcaagcagaccaaccccggcttcatcatcttcgacatgatcgacaacatcacgttcaccggaggcatgaccaacggcggacagcgtaccgatcagatgctcgaagcgatgtaccaagccgcccgtaactggtgcgtcaagtacgacgcagtgggcgtggcgacatcgcagatcagcgccgagggtgagggcatccagtacccgccgcagtccgcactgaaggacagcaagacgggtaagcagggtgcgtgcgacttcatcatcatgggcggcaagctcaacgacccggcgatggaacgcttccgctacatcggcacaccgaagaacaagctgcaccgcgcaggcggtaagcgtgacgttcgtgaggaggtgatgatggatgccgagcgcgcccgcttctatcaggaggcagcatgagtcagacgaaagtggaagtgcacgggcaccgtgtgttcttgcccggcatccagaaaggattcgacacggtgtccagcagtcaggccaactacctcgcgtccgtcgtgagggatgcggtcaacgctgcatacatcgaaggacgcaacgatgctccgcagtggaagtggggatggttgcgcaacaagcacagcacatggatcggcgtgcactactcgccgcacaacaagcgctggtgcatcaacctgatcccatgcttcacgctgtggatcaccaagcccggaggtaacacaccgtgagtaccgaaccgaacatctacctgccgcgcaacgtgggcgtaatcacgtccagccgcaccggcagcagctacaccgtcgagcctgccgtgaccgacacggacatcgacttcctcgtgctggttcaggatttccacgaggccatcgccaagctggtcgagcagggctggaccttgtgctctggtgctgacgggcactacgaggaagacgaggactacagcgacacgtggtacgctctgcgcaacggcgtgttcaatgtcatggtgactgccgacagtggctggtataagcgcgcggtcgaggccaccaccatctgcaagcgccgcaacatcaaggacaaacaggaccgcatcatcgtgttccggtgggtgcgcgatgggctggacttggatggcgatgcgtcggatgaaatgtaccagcttgccctgcaacggtggccgctgtgagcttcacttccttcgacctcgaaaccacgatccgttccatcctgaagcgcaaggccaatccgttctacgacatgaacaagatcgtggcgattggctacaagcgcaagggtgacgcacggaacaccggcctgtactacgacacccgcatcggcatcgacaaccagtacatgggcggcgcacctgacgggtggctgcgcgagctgtgttacgggcagcagttcctcgtcgggttcaacatcaagttcgacatcctgcacgccatctgccaaggcccgctcaatcggcaggcatggatcgagttcatcgacggcggcggcatggtgtgggattgccagcttgccgagtacctgctgcacggcatgacgcaagagttccacatggcgagcatggacgagacggctccccgttacggcggcaacctgaaggacgatgcagtcaagtccctgtgggctgcgggagtggacacctgcgacatcgacaagacgctgctgatggattacctcctcggcaccaacgacaccgacgacgtgggcgacatcggcaacaccgagaagatgttcctcgggcagctcgccgccttccgtgcacgtggtggtctgcgctcggcgctgctcaacatgggcgcgctgtgcttcaccatcgaagccgagtacaacggcatgtacgtggacaaggaatgggcgcttgcgaaggcgaaggagttggaggtcgagcttgcaacagcgacggctgaactcaacggcttcatccccgagttgcccgagggcctgaccttcaactggaacagccgcttccacaagagcgcgctgatcttcggtggcaaggtgaagtacacggccaaggttccgatcatgtccaccgagggtgggccgacctacgtacagaaggacgaggtgcactatgtgctggtcgatggtacaacgacggcgacgccaccggccgaggacttcgacaacctgtggcggtacaccacctacggcagcggcaagaacaagggcgagtacaagaccaagaaggtgaaggtcgatgacttgaccaagcagaagttccgcaacgaggacatgctgttcgagttccccggctacaccgagccggatgctgcgtgggaaagcaagagcgatccgggtgtgtactccaccgccgccgatgtgatcgaggcgctgggctatcgcaacctgccgttcaccaacgcactggcccgccgcgccgacatccacaaggacttgtccacgtactacatcacgacggacgagaagaccggcgagcagaagggcatgctcacgctggtgggaccggatggtatcatccaccacaagctcaacatgaccaacacggtgacgggtcgcctgtcatccagcgatcccaacttgcagaacgtgagcaagggtgagctggacgaggagacgttggaggagaagggttctcagatcaagcgcgccttcgtgtcccggcacaagggtggcaagatcatccagtcggactacacctccctcgaaatctacgtgcaggctatcctcaccgagtgccgtcagctgatcgaagacctgaaggcgggcctcgacatgcactgcctccgtgccgagcaggcgtggggcgagcagggcaagtacgactacgacttcatcctgaaggcgagcaaggacgacaagcatcccgagcacaagaagtggaagaagaagcgcggcaacgcgaaggtgttctccttccagcgtgcatacggtgcaggcgtggcgaagatcgctgcgaccaccggcatgacggaggaggaagtcgaggcgctggtgcgcggcgaggccgagcggtacccggaactgggtgcttacatcgaccgcatggtcgaggccatcaagcgcaaccgcgtcagcaccaaccgcttcgttccgcaccccgacgccggacggcagggcgtgcctgctgggctgacgtgtcagctgggccggtcgcactggaccacgccggacggcaagatgtattccttcagcgagtcaccgtccccggtgttcatcgccaacaagcccgcgagcaagggcggctgcgcgcagtcgttctcgcccacggaaatcaagaactacccgatgcagggcaccggtggtgagtgggccaaggcggcgatgtacgtcagcctgcgcgccttctaccggaagtacgtgaccgaaccgaaggagtggttgggccgtgcgttgctcgtcaatcaggtgcacgatgccgtctacgtggatgcacatggcgacatcgcaaccaaggccgctgctctgctgcacgcctcgatgctggaagcgtcggtgtatatggagtggtggttcaactggacgctgccgcttggcgtcccgtgcgaaaccaagatgggcgacaacatgatggaggagaagaatcctcccgcagagttcgccggtctggtcatcgagtaccgagcgtcgatccgcaaggacttcgtaggtaatcacaacccgtcgtttgaataaggagaacaacacgcatgagtcttgacgcactgttgaacaaggtcgccacgcagggtaaggaccagtcggtcgccagtggtggcaacttcgactacaccccgcccgctgccggtgtgaccaccgcccgcatcgtcgggtactacgagctgggcaagcacgagttcgagttcgagggcaagaagaagacgcaggatgaagtcgccatcgtgttcgagctgaccggcaagcagcacccgcacatcgagacggacaatggtccggtcccggtgcgcatgacgctgacgctgggcctgtccaccaacgagaaggcgcactacttcaaaatcttcagccgcctgcgcaccgaggagcgccacttcgtgcagctgctgggtcagggtgtgctgctggaagtcatccacaagccgggcaagcgcgacccgaacaagaccttcgccgagatcgacaaggcttccatccgcaagccgatcatgccggtgccggaaatggagaacggcatcccgaccggcaagttcgtggacaccgtgatcccggtcccgcagcagatcaccccgctgggtgcgttcgtgtgggacttcgccgatgccgaaatgtgggacagcatcttcatccccggcgagtacccggagcgcaaggacgagaagaccggcaaggtcacccacgaggcgcagtcgaagaacaagacgcagctgcgcatcgctgcggcgctgaacttcaagggcctgccgtgctacgactacgccgctgccaagttggcgggcagcaccacggtcaccaaggaaggcgtcgatgcgctggacgaagtggtcggcgacgtggcgaacgctgcgcccaccgacgctgctccggccgacgacaagccgccgttcccggtggacggtagcgacccgatggcaggcatcgcctgatggacctgagcgctctcatggctgcggctggtgagcgctccccgatgccggtacaagtggtacgtcaacacaatccccgcgtgatcgctcacgtggatggggactacatggcgtacttcgcggctggtagcgagaactgctcggcgggggatgcacggcgcaacgtgctctcccgctgcgcacagctgaagcatatcagcggagcgggtaagatcgtcatgcacctgacgcacggcgcatccaccaagggtgaccgcttcctcgctgctaccacgcagccgtatcagggtcagcgccaagcaggccgcaagcccaacaactgggcgttccttcgtgagtggatggagacatacgagggcgacgctttcactcccaaaatctggctgacgcgagaagccgacgacggcatcgcatacgtcaacgagggtgcagcattgcaccacaacatcctgcacgtggtgcacagcgccgacaaggacatgcgaatgttctgcggcgtgcatgtagactgggaaggctacggcatcaccgaggttccgctcggcgcttacgacatcgtgggcgagaacgggttgcagtacggtcacaagtggttctggatgcagatgctccacggcgacaccgccgacaacatccccggtctgccgaaggtaggcaaggtgacagcggagcagctgcttctcgacacgaaggacaacctcgaagcggtgcagctagtgagcggcaagtacagcgaagtgctcggtgccgactggcgcaagacctttgccgaacaggccgtgttgctgtggatgcggacggatcgtgacgctgaactgctggacgtgctgaagctcgacgtgttcgggccgcagctgaagcaagcattctacgacctcgccgaggacgtgaacgagaagcgcgcaatcttggaggcatacaaagcatgaagcgactcactgcaacgcaggtcaagctgttgcgcatcaagctcgcagcggagcaagggaaccgatgctgcctctgtcagggacagttcggcctgaaggctccgctcgatcctgtgctggaccacgaccacaagaccggcgctgtgcgcggggtgctccatcgcggatgcaactccctgctcggcaaggtcgagaacaacgcaggccggtatggcgtgcgcgatgtgttcgcattctgtgcgggcatccccaactacctgcggtcccacctcaccaacatcacggggtacctgcatcctacctacaagaccgacgacgagaagcgcatcgctcgcaatgcgaaggcgcgtaagcggcggtcactcaacaaggagacaccgtgacccttacccagttcattcgccgagcaccgaagcgcggcccgaagattctctgcctcgacatcgagacgttccccatcgagttctacggctgggggatgttcaacaacaacttcagcgtcaagcagatcaagcgtgactggtcgctgatgtcgttcgcttgcgagtggctggacgatgacgagtcgttctatatggaccagcgcaacgtgcgtgatgtcttcgatgaccgcaagcagggcaaggcactgtggcacctgctcaacgccgccgacttcgtgctagctcgcaacggcaagaagttcgacctgcgcaagatcaaggcgcgcctcgccatcctcggcctgccgcccgtgtcgcccgtgcaggtgatcgacccgatgctgctgaaccgcaccgagttcgccttcacctcgcagaagttggagtacaccaccggcgtgatcgtgccggagctgcgcaagtacgaccaccacaacttccccggcttcgacctgtgggtggcctgcatgcagaacctgcccggtgcgtgggacgagtgcgaagcgtacaaccgcatcgacgtgaagtccatgaagttggagtacaagaagctgcgcggttggtactcgcagcatccgaacgtcgccgtgtactacaaggccgatggcagcgagcaccgctgcaacaagtgcggctgcaacgaaatgatcccgcaggatgatccggcccgcacacaggtcggcacgtacctcctgcttcagtgcaccgtgtgcgacggctacagtcgtgggcgtaagctgacgaccagcgccgaggcccgcaagcacatcaccgttccggcataaggagccgacatgaagatcaccgacatccgcagcggcatgcgggtacagtacaccggaaatgcgcccggcctgatcgggcggcgcgggaaggtaagccgcgtgttcgctaaggatgtcgaggtcttcttcgacggacgtgtgagcgcgagctactgcgttcccgattccctccgacagcttatgagcatcggaggtgtgaccaccaccagacgagaggtacccatgcccgaactgaactaccgcaacgaggacgagcgcacgctgtccgaccgtggcgtcggcctgaaagatgacggcggcaagccgcaggctcggctgctgcatgagggcgtgcctcgtgcactggcccgcgtcatcgacaccttgaccttcggggcgcagaagtacaaggcgcactcgtggcagcatgtcgagaaggcgctcgaacgctatcaggatgcgagctaccggcacgacaacaagcgctgcctcggcgagaagctggacccggagacgggcatccatcaccgcgcgcaccacatcatcaacgagctgttcctgttggagttggaactgcgcgaggaggagcaggcccgtggcgcagagtaagggtcgctcgatcaaggaggcgtgggtcaacatcgccatcgggtacagcatcaactactgcgcgaacatcgcgttgctgccgctgctgtggcatcccgaacacccgcttatgtcggcccacgccatcggcgtagccttcacgcttatcagcttcgtgcgccagtacatcatccgccgctggttcagcaagggtgactgatggcctgcgcccgctgcggccaagtgcaccggtacgtcccacatgaggccgagtgggcgcgcttcctagaggagcatcgtacccgcaagcagttcgatgtcgagtgggccaactcactctggcatcgcacataccctgacgacgccttctgcattcttgtgatgaagggccgcgcaggtttcgttccattcccgtcgaaggagaaatgaatgctctacaagaaccagaccgccatgcttatcaagtcctacgagaacaccgtggcgtggggcgagagtgccgaccacgaggaggcgttgcagaacgcggtcaaggcgggcttcccgaacctgccggaagaagatcaggccgagctgtatacccgcatcgccgatgcgtgggaaggctaccgtggttcgctcgctccgcgcaagctgtggatcggcaccatcgtcaaccagttcatgtcgtcccgcatcgcacggttcaacgccgcactgggcgatggcagcaagaaggaggacagcgccgatgtttgacatcaagcgagataacgtgcgggtcgctcccggctacaagaagcgcaagcgcggcttcaagatcaaccgcgccttcaccaagggcaacttccgggtgacgtggtacgacggcaaggccacctactgggagcagtacgtgccgtggtacaaggtgccgctcgccatgttccagatttggagggaccacgcatgagctacatcgtccacaaggcagtcgagcaggacaagatcaagaagaagctgcgtcccaccgaggagcagctgcgcaccgagtacatcgcacagcccaagtacgacggctgcaacatggtcgccatcaagcgcggccactgggtgcccaccgtgaacaagggcctgcacgccatcaaggtcggcgacgtgcagatgcagcccgtggatcgcggcgtggtggacctgttctcccgcaccggcgagcaggtggtcagcgcgcaccacatcgagaacgctctcgcttccgcaccgttcttcccggtcggtgtctacttcggcgaatactggcacccgaccatcgaccagcccaccgtcagcggcatgttccgcaagaaggacggcacgcagtacaccgagccgatgttcgtggtgttcgactacgtgacgctggaagaatgggagcagggatacagcgacctcgtgtatcaggagcgcgtcagccgcctgccgagcatgggccacgccatcgccgagggtaccgctcccgtgttctacgccgagtcgcagggcttcctgatcgaccaagagctgggcagcatggaggcggcgaagctgctgtgcgagggtggagcatacgatggcctgatcctgcgcaagccgagcggcaagtgggtgaagggcgacaagggcacgaacggcgaagtcgtcaaggtaaagcccacaatcacgctggacctccgcgtcgaggacatcggcgtcgaggttggagagaagaccggccgcaacgtctacaccctgtgggtccgactgccgaacggcaaggcgcaggaggtgggaagcggcgtgccgcaccatggcaacggtgttccgaaggtcggcgacatcgtggaaatcgaggcgatgtcgtacagcaagttcggtctgctgcgcgagccgcgcttcaagggaatccgctacgacaagccggaggctgaccaatgagcaacgtcaagaccgaggtgtggcacaacatggaacgcgacacagtggaggtgcgagtgagcatcccgttccgcgagtacgccggttccttgtggccgaacgagacggtgcgcgatgcggtgatcgaatcgctggatcgcttcctcgccgagcggaggggctgatggacattcgattcggaaagcccgagctggatttcggcggtgatcgcttcgctccctacggtggaggtcatgtaaccgtgactgccactgcgtggtgcggcaccgagcagttcttcaaccgtcagtgcatcccgagctacgaggtcggcggcgacgcatggccgcacatcatcaacgaaatgcacaccgcactggtctgcatgatcctgaagcgttacccgccgacggacttcaccatcaagcaacggaggtagcatgctctcgcaagtggaactcgaactggaaacctacgccttcggtaaggagcgcatggagaagtccatcgcccgcaacgaggagaagggcggcgcggacaacaacccctacgcccaagcagtgtatcgccggttcgtgcttccgcttgcggagcgcatccgtgcggacatcgactccccgcgcatcggccgcgcccaagcgcacgtgccacttctgcgcgccaagtacgatcccgagcgtcagaacaagagtggacaggccatcagcgccgaggaacaggcccgcgagtggtacgaggctgtggccttcgtcgccgttcgcggtgcccttacctcttgcatgcgtgacaagcacggcgaaggcagcgaccgcgacgtgctgaagaacgtcggcatcaacgtgtaccacgagtacctgctgacgcagttcgccgacgcagagccgacgctgttctaccacctgatgaacgacatggaccgcaagctctctgtcaacgagaaccaccgcatgacggtgatgaagatgcagggtcgcaagaacggcatcgagttcgtggagtgggggcaggcgcagcgcgatcaggtcggcgcgtacctgtgcgaccagcttgcacagctgggcatgttggagattggcgtagtcaccgagactgcggccagtgccggtgcagcgtaccggaagttccagaccaagacgcacgtcaagatcgtgctgaccgacgaggtgcgcaagctgattacgcagatcagcgacttcgtgatcgaggccacgccgttctacctgccgtgcgttgagccgccgatggactgggtggacatcgacaacggtggattccacacgaaggaaatgcggcggctcaatccgtggatggtgaagacctacgctcagacgcgcgacgagtaccgcgccgccgagctgcgcaacgagatggctgcgatcaacgcattgcagcgcgttccgtggcgcatcaacaagcgactgatggaagctgtgtcggccatcgccaaggtgcacgacatggaggaaatcatttcgcagggcgagctgccgaagccgcgaaagccggagtggttgaccaaggacatgaccaaggaaaccatgtcccacaatcaggagttggagttcaagcagtggaagcgcgacatggcgaactggcacaccgacgagcgcctgcgccagaacaagggcaatcgcttctacaacgcaatgaaggtggcgcgtaagttcgctgagtacccgagcatctacttcgtgtacttcgcagacttccgtggccgcaagtacgttcagaccaccggcgtgtcgccgcagggttcggacttgcagaaggcactcttggagttcgccgaaggcaagcccttgctgacgaaggacgcgcaggattggttctgcatcacgggagcaaaccgatggggttacgacaaggcgtcgttgccagaccgagtgaagtgggtgcgcgagcatcacgaccagatcatggccttcgctgcggacccggtgaacaacgacgagtggaagacggccgacaagccgttgcagtttctgagctggtgcatggagtacgagcagtggcaagtgttcggggatcgcttcctgagccgcatcgcagtcgggatggatggttcgtgcaatgggcttcagaacttctcggcgatgctgcgcgacgcagcaggcggggtggcgacgaacttgatcccggcaccgctgccgaatgacatctaccagatggtcgcagaccgcgtgactgcgatcctgctgggcgaggaggaagacgccgaagggtaccgcacgctgtggctcaaccatggcctgacgcgctcgctggtgaagcgcagcgtgatgactctgccgtatggctcccggcagtcctcgtgggcggacttcatcatcgaagactacctgaagtgcggcaagttccccacgctcgacaaggccctgtacggcccagcagcgcgcttcctgagcaagcgcatgggtgaggccatcgccgacaccgtggtcgccgcagcgggcgcgatggagtggttgcagcgcggttcgggtgcgatcctcaaccaagggtacgaccgcatccggtggatcacgccgtccggcttcccggtggtgcaggtgtactgggaatccgaggagcaccgcatcaacaccaagctgtgcggtaacgccaagctgtccctgcgcaagagcacggacgcggtgaagaagtcccggcatcgcaacggcatcgccccgaacttcgtgcacagcctcgacgccagccacctgacgctggtggtcaacgccgccaaggccgaggggatcgacgccttcgccatgatccatgacgacttcggcacccacgccgccgacagcgcggccctgtaccgcatcatccgggaggtgttcgtggcgatgtacgagcggcacgacgtgctctcggccttccactcagcctacccgttcctgccggagccgccgccgatgggcgagctggacctgcgccaagtccttgattctccgtacttcttcagctgacggagtttcagtacacctatagcacacaggccaaccgaggtccggttggagcggccgcgattgtaagcggaaccggtgccggaccttttggtacacctatagcacagaggagacaccatggccgaagacgccaaagtgaaagtcctgatgacgctccacccgaaccagcttgccgccgtgcggcgactgtccgggctgtcgctgtccgtcaactcgaataccacgcccttggaggcaggtatgcagttggggatggcccgcgtcctgaacatcttacaggagggtttcaccgttgatacctccgtaccgaacaccaacgacgggtgatagtgagcagatcaaggcggctttaacggccgctttgtatctgtcatctagagaagatagtaaggtagacaacagagagtcttctgtaagctacaactgtgatgatcctgattatacagtagctctgataactcagaacttagtagatgcagtcatcatagatgaagcctacctgctatgctttgccattgtcacaccgtggtattccaagaaccgtactacgttcgttgagaacatggtgctgcgcattgggccgggcagttccttcgaccggtacatagccgtgatggaacatctggctgacatcaaccactgcgactccctgagcgcaggcggtgcactagctcggaactcccgagcactcacacggatgtatgcacgctacggctacctgctggaacggcatgctccccaattcaccaagcgaaggagttaacctatgggtagcatcgttggtggtgggtctgcaaagaaggctgcgctgaagcaagcggcggctatcgacaagcagaccaacctccaaactcaatccacgaactaccagattcaggcgatggccgatcagatggcgcaggcagctgcacagcaggccgcatccgagtacgccgagaagttgctgagtgcccctgtcgataccgtcgatgtgcgactgggtacttctgacctcgacttgcagaccgccgacctgatcggccgacgcaagaccgcccgctccacctacacccggcccgtgaccacgaccgcagcttcccggctgacgaccgtggccgggtcagacctgttgtgaggtgagcatggaccattcgatccaaaccgctcaccgccagttcgaggcttacgacaacaagcggcagggcatcatgtaccgactcgaacgctattcgagctggactgtccccaagctgttccctcgcaagaaccgcgatcaggacaccgagccgctgacccacgggttccagtctctcggcgcacaggcagttaaccatctggcgaacaagctgatgatgtcgctgttcgcaccgtcccgaccgttcttccgattggagctgaagcgcaaggcgaagcaggctgcgcaggaacagggcgcggacttgcaggccatgcaggcaatgcttgcgaaggccgagcaggacgccagtctcgaactcgacaagcgctcgatccgctcccgactgtacgacctgctgaagatgctgatcgtgctgggcaacgccctcatggtgttggagaaggacacgatccgcgtgctcaacatgcggcactacgtggtcaagcgcactcgcactggcgaggtctacgaactgatcctccgggagaaggtgcacaagacccagctggaacccgccgcactcgctgctattgtcgcacacccggacttcaagcccgatgacgacggcatggtgtgggagtacaagtgggtcaagctggaccacaagaccggcaagtacaacgaagacgtgtggatttgcaactgcaagctgcccgcaaacttctcctcgacctactccgcagacaagctgccataccgggcggtgagttgggacttggccgcaggcgacgactacggctccggcttggtcgaggactacgaggcagacttccagtctctctcgatgctgtccgaggccgcagtgcagggcgcgatcctcgcatccgagttccggtggctggtcaaccccgcaggtcagacctccgtcgaggacttcatggcatcgcccaacggcgcggccatccccggcatgaagggcgacatcgagctgattaacgcaggcgtcgatggcgtgctgcaaaccaaccaagcaatccagtccacctacatcaaccgcatcggcgcaggcttcctgttgcagacggcggtgactcgtcaggcggaacgtgtgaccgcgcaggaaatccgcatggtcgccgaggaactggaaggcgggctgggtggcggctacagccgcatcgctgcggacgtgcaggtgccagttgccttttgggtgatgaacctcacgggccgcgacatccgaggcaaggacttggagcctgtcatcatcaccggcttggccgcgctctcccgaacgggtgaccgtgaccggctgttggagttcggcagcaacctcgcaaacgtcctcgcgctgccgccgcagattctcgaacgactgaagctgtccgcgtggatcgccgacctcgccgccgctggtggcttggacccgaacgtatacgtgctgactgaggccgagtacggccagatgatgcagcagcgtgcgcagcagcagctggtcatgcagaacgcatcgcagcagatcgacaacgccaacaacatggagacacagacacaatgagttccaacgcacctccgggcggtggtcccggcgcaaccgtgatcgcaacctcgcacggcaaccagcccgccccggcagctccggctccggctgacgacaagctgctgcccaacggacagcccgcaccggctgcaccggcacagcccgcagctcctgctgcgcctccggctgctgacgctctgagtctcgaacccgctgctcccgcacagcccgccgccccggcgaacgctgcgccgactgctgtgtcgattcccgactacggcgacaacggcctgaacatcgcggccgaatacttcgtcaacaccgtcggcctcgacatcgacagccgcgaactgaccgaagcagcgaagggcaacttcgccctgctggaagccaagctggaagtcctcggcgataaggccaagggttccgcaccgatcctcgctctggcgaaggagagcatcgctcgtgtcaccgccgctgcaaccgcagcgcatgccgcgaacgttgctgctgtccacgaagccgtgggtggcgcagagaactgggctgcgatccagcagttcgcacgggccaacctgcccgccgaccaactgaagcaggcaagcgaatcgctgtcggctggtggcttcggcgctcaggcgaccgcgcgttacctgatggctctggcacaggccaatcccgcgacgaccgtcaagggcgcaccggctaccaatgccgccgctcctgccgcgtcgatcaacggcgtcgctcctctcacgaaggagcagtaccgcgctgagtaccgcaagctggttgccgagaagggcatccgtggtgcggcccactccgaagaactgcgtgcactcaacgcgcgcgtcatccactaagaaccaaggagcaacataaagcatgagcaccatcttcccaaccgtcccggttctgccgaatcaggtcaaccagtccggcaacgagaacgcgctgatcctcgaacagttcaccggcgatgtcgagcacacctacgtgtccagctcggtgctggaaaagttcttcccgcgcaagcaggtcaagggcaccaacaccctgaccaagaaggccatcggccgcaccaagcttcagaagctgaagcgcggtgatgcgccggacggcaccccggtggacttcagcaaggcgtcggtgaccgtcgataccatgctgctgtcgcgtcacagcatctggcagctggacgaaatcttcaccgacatcgacacccgcaaggaaatcgccatcgagcagggtcaggaaatcgccgagttcgtggacctgaccatcagcatcgccgccgccaaggccgctgctgccacgcagtcgatcttcacccgcaacggccgcgcgccggaaggccacttcggtgccacgcaggtggtcctgtccgctgccggtgacgagaacgatccggccaaggtctacgccgccatcggcaagctgttctcccgcatggaggaggagaagaaggtcaagccgcagcgcgacggcgtggtcctgatcgtgcgtccggcgatcttctacctgttgcagcaggccgagcagatcagcaacggcgagtacctgacctcggacggcaacaagctgaccggcatcccgaccttccacggctggggcgtcccggtgctgtcgagcgagaacctgccgaacaccgtgatcgaaggtcacctgctgtcgaacgacgacaacgacgacttctacgacggcgacttcagcaccctgatcgccgtggccgtgtcgccgaaggccctgctgatcgccgaagcgctgccgttgcagtcctcggtgtggtggagcgacgcctcgaagtgctacttcgtggactcgtggatgtccttcgccgttggtctggatcgcgtcgagaacgcgggccgcatcgacaaggttgcctaatccgctgggcgcggtccctgaatccttcgggtaactcaaaccgcgcccgccttccaccaacacaggagcaccatcatggtctttgaccgaccgttcgagatttccaaccgcgtcgtcgccgctaccggcgtggccggtctgcccgacaactccgtgggcaccgtcgtcggcgtccactacgacgccatcggcgcgggctgggtcgtgcgcgtccgtttcgttgacgacgaaatcggctcgcaggacgtggagtacgcaccggcctcgctggctctggctgcggactaagcaacatcccggcaggggcgctacggcgtctctgccttgttcctctcaggagacaccatggcattcatcaccaagctcgacatcgtgaacgcctgcatcaagacgatgggcgagacgaagctcaacactctggaagatgaccacgtatacaaggacgacgcagttgacttgatcgaccgcgtgcaccgcgacgtgtcgtcgctctcgctgtggttcaacaccgaatgggtggagctgaaaccgcaggcaacgagcaagtacatcatggtcccaacggacgtgctgaagctggactgcaacccgagccgattcggccacgtggtgcagcgcggacgccgcctgtacgaccgcaagcgcaacacctacgagttcgaccacaacgtgcaggccaagctggttcggctgctggacttcgatgacctcccctacgaggtgcagatgttcgtgcgggacgacagcgtgctgcgtttccagtccgacttcgacggcgacaacaccaagtacgccaagatcaagcagcagcgcgacgactcgtggatcaacatgaaggccgagcatatccggcagatcaaggcgaacccactgttcgcgcgtgcgtccgtggacgtgctgcatcagcggtacttcaactacagcggacacccgtggcatagccactacactttccccggctaaggaggcaacatggcaaaggcaggcggaacctatcccgacatccttcagggtgtcagtcagaaaccggcgcaccgtcgtcggccgggccagacgcacgagcagatcaacgtgctgtccgatccggtgaacggccttgtgcgccgtcgtggtacgcggttcgctgcttcccaagccgttgtcacctcggccgagctgcgcaacatggacgtgttcgacttcatgcaggaaggcaaggagtacgcgctgctgtatcggcgcgatccctctacctcgggaagcgagacgttcgcgttcctttacaacaagacggacgaggcgttcatcccgctggtctacgagaacagcacgtgggtcaacacgctggtcagcggcggcgcgtcgtcgctcgcggccatcggcagctacgtctacatcgcgggcaacaccacgatcccttcggccaccagcacgaacgtgtggcaggagcagacgaacatccagcgcctcgccgcgtgggttcgcaccggcaagtacaacacaacgtacacggtgaacctgacgcgcacggacaacacggtgctgacggttacgttcaagacggtgaccgcatcgtaccccggcacgctcgacacgagcgacatcccgttctacctgcccggtggcacggagccggacccggcgtatcagaagtacgtcaacgaccgagtgaacgagtacaactccgcagtcaacgagtggatcgtgaccagtgccgagcagacgcgcccggagtacatcgccgagcagctgtcggatttgctggtggacgcgggcgtggcggctacccacatcaagggcggcatcatcattgacgacgaccagttcaaggacatcacggttgacgacgagggcgacggcacgaccttctacgccgcagggcaggagattaccgacgcgacctacgctgtcaagttccactggcacggcaagatcatccgcgtgcgcccgagcggtgcaggcgcggacgagacgtactacctgcgtgccgagttggagaacggcgagacttcgggctacggctcggtggactggtacgaagcgcccggcgtggagtgcaccatcgacaacctcgtgtcgcagctctacatctacaacggtgtgggctacatcgcacgcaacggcgcgggcctcacgtctctggctccgggcagcggcgagcacccggcttacggtgcgcgggttgcaggcgacggactgacctctccgatcccgtggttcatcgacaagccgatcaccatgctgtccgtcttccaagaccggctggtggtgggcgcgcagaactacgtcaacgcctcgcggtcggcggactacctgaacttctggcgcggctctgccgtcaccatcgaagacagcgaccccatcgaaatcttcgcgcatggcagcgagggcgatgtgctccggcacgccacgctctacaacggcaacctcgtgatcttcggtgaccgtcagcagtacgggatcagcggcgactcggtgttcagtccgaagaacccgcttatcaaggcgttcagtgcgaacaaggattcggtggacgcgaaggcgcagacctcgggcaactacatcttctatgcgcagtacggcagcgaaggcacgagcctgcaccagatgcgcgtcggtgcgctcaacggtcagcagacggtgacggacgaaatgtccaacgagctggactcgtggctgtccggcacgccgttgcagatcaccgcgctcactgccccgaaccttgtgatgttccgcacccgagagcacccgcaggacttctacctgtaccggtacgaggacaacaagaacaacgggcagcgtatcgtggactcgtggtcgaagttccagtaccacccggcgctgggcgaaatcatcggcgtcagcagctacaagaagaacggcctcgtattcaccgcacgcgggtcgctggtggcgtgcgacgtgttcgacccgaagggcgagccggactcgcatgcgtgcctcgacagctgggcgagttttggtacacctacgggcgtactgaccgcgagcgcaagcatcgccgtcaatagcactagcccgtacttcctgctgggttgtccctacgctcaggcgtcggacttccttagccagttcgatgacctcgatgctggtgcgctggaatacggcgtcgtgtctgaggcgctggtgatcccgaccaatccgttccctcgggaccagaacggtcaggctgtgctcgatggccgcatgtcgctgaacaaggtgacggtggacgtggagaacacggcgggcatgctcgctgcggttaccacccgcaacaacagcgtgaccaccacggacttcgagggccgcatcctcggcgactccgacaacctgatcgcgcggcaaccggtgtaccgggggcagctgaacatcagcgtcgggcgcgaagtgcgtgagtgcacctacgagattcgcagcaaggattggctcccgctccgggtgaccggcctgagctggacgggtcagactttcaacaatgtacggagggttagctaatgggttcggttaatacgatcctgcaagcgaacaacaccacccgcgttgcccgtgcgaactaccgtgcagccgttgcgcagaccgacaacacgaaccgcagcgaggtcgccaagaccggcttcgctgatttcatgcggtccctgaagaacaacgcccagctggacgccgccgcgaaggagtacaactccaacatggaggcgctgtccgaggagctgcgtgcacgccaaggggctgggcttaactcccagctccaactggcgaacgcgcgcggtgcgcttcaggcacaggccggtgctgtaggtgtgggcggctcgtccgcagacctgatggataccatggttcgcttgcaggcggaaatggacaaggagacgcaggacaacgcagtctcgctgctcgcctctcgcggcgcatcgcagacggcgcaggtcatgtcgcgcgcgtggaatgggatggacatgagccgcacgttcggccagttcgactactcgcagcacatcgagccgaaggcgatgaagcgtcgcttgggcaagctgatcggcgtggccgtggctacctacttcggcgggccgatggcaggcgaggctgtggcagacttcgcagtcggcacgtggcaggcggacaacggcaacttccaaggcatgtcgcagtccttcaacaacgcagcgcagaacgggatgcaggcgtggcagcagtccaatgatcgcggcggcaagtcgtgggcgtccactaccttcgggtacaacgacggcaccggcaagcagtccgtgaccggggcgaaggtcaccggcaacttcggcaacaactacgacaacttctccaccactacgtccggcctcggctggttcgacagtggcagcggaggcaactcaggaggcgcatggtaatggctgacatcggcacggttaccttcaacacgcagtccgcattgcagggtggcatcaacgccacccccgcactgtcgggcaacaccagcattcaaggcgctggtgtgaatcaggtcggccccgttcgctcgggatcggattggttcgagagcactggtggtatgacgatgccggacagcaacctgcccgagttcttgcaggaactggcagcgccgaacaccgccaagctgaagcagcagcagatgtgggacggcttcgttgccgcccgcgctggtaagaccatggacgagattgctgcgaccgagccgtggtacaagaaaatcttcggcgacaccaactacgagattggcgcgagcatgtataacacgctctcgcaggtcaacgaaatggagagcgacctgctgcggcgtatgccggagttgcgtaagcttccgcccgaggcgatggcgaaggaattcaacgacctcgccactgcccggatgaccggcaacggtttcgcggacacggtgttgcagaagaccttcatggatcgcgcgggttcgctgatggacctgcacacgaaggagcgcacggcgtggcagcagcaggagctggtgaaggcgcagtacgctgcgaactcgtcggcgtccactggcttcaacgaactggcgaagcgcacggcgatgctcggtaccaaccgtcccatggacgagaaggccaccgaggcgctgacacaggcgcagctgtcgttgctcgacggtctgtcgccctcgcgttaccagacggacgagtcgtacaagtcggcgatcaccgcgttctaccgtggcgctgcggatcgcggcgagttccacacgctgaagttcctcaacagcaagggcgtgctgaacgccatcgaccccgacgggcagctgggaatccagcagtacgtgaagcaggcgcaggatcggtaccgctcggactggctcgatgccaacccggagcaggccgagaagatggcgcttgtctccatgtacgcatccgagggcattggtgccaagccgtcgcaggcgatgatcgaggaaatgaacgcgacctacgccgctgagacgggcagcgatgcgccgctctactcgggcacgcagcttgcttcgatcatggcgcagtccgcaggcgcgcacatccgcgcgcaggaagccgtcatcaaccagcgcaacgctgcggctaaggctgcactgactgaccagcagaagctggcggcgcaggaggaggacatccgtggcggcatcgagtcgttcaagcgcggcacctacgcgcagacgatcaacatccccggcgtggacaaggagctgatcgaagcgaacgtggtgcaggcgtggaactccacgatggccgcgaacccgaaggtcgccatgtcgcagctggtgtggaacgccaacacagggcgcggcgctgtgctgaagggtgtggccgatcagttccagaccacggcgcgcgctgtgctccgcgatcagccgaacacggcagcggctgcgctgtaccagcagtggaaggaactgaagcagacgaccgctgcgcgcatcgacacgaacggtcagcctgtgcagggccgactgactggcgcaactaccgccgcgctgtacttcggagatagcgtcaacacgttcttcaacaagctgcaagcgttggagaatggcggcgtgaacttcgagcttgcctacgaggtggcccgtggagaaatcaccaccgacgatcccacgcagttcgacgcgaacagtcgtaaggaatccgaggctactcaggctcgtgttaacgacgctatcgcaaagctcaaccccaagtacctcgggatgttcggcaacaagctgggcgactctggccgcgctgcgtatgctcgcgccatcgtccggtcggtcaccgacagcggtgggctgctggacacttctgcggaaggtttgcaagctgcggctacccacgctaagctggcctacggtctggaagacgcgggcaagtacgcatgggagaacggacgcgacgacgaaggccgagtgatcggcggtgttggtgcgtggctggggttcatggacacgaaggagacgggaccggccatcgagaaggccatcgacgcagcactgcggcgggtcaacatcgagcctactaccagtctgaaggctgacgtgttccgcatgaaggacagcgagaacggcgagccggtgctgtacgtcaacgctgttggcgagaagggctggaaggttgtgccggtgtacgggcgcgacatcaaggccgagtacgagaagcacacgaagcagcagcggcagttgcaggccccggtaccgcagggctacgttcgcatgaacgacggtacgattcagcagagcatttccatccaacccaaactgtaaggagatagacaatggcactcgatctttcggggctgacccaagaccagcagattgccaaggctgccgcttatgcgggagtgccggagtccatcgtgcgcggtcagtggcgagtagagtctggcaacggacgcgcagccaaggacgctgacggtgtgatccgcagcaaggcaggagcgcagggcgacttccaagtcatgcccaccacgcaggcaacgtgggaagcgcgcaacggtcgcaagtacgacatgcgcaacttccaagacagcatcgagctgtacgccgacatcatgcgcgagaacatgcagcttgccaagggcgacgttaccaaggcgctgcgcatctaccaaggcggcaccaacccgaagaactggggacaggagaacgcagcctatgcaccgagcgtgctgggtggcgcatccgctcccgccgtgtcggcgcagccgcgcagcctgaccaccactcaggcagacctcaacgccgcgtggcagggcaacccgaacatgcgcgaccgcacgtggtccggcgcttccatcccggatgcgtggaccggtgctcccatcgaaggccgcaacgctctggcgtcggcagcgaaggaacacatcggcaagattcgtgcgggcatcgccgagctgtcgatgggtcaggtggcgcaggaaggtggcaccgcagagcaggctgtgggcaaggcgcaggccgtccgtgcgtcggatcaggtcgtgccgtggtgggtgcgtcaggaagtggacgtgctgaataccggcgctcgcaaggcgctgctggatcagaccgagcaggctctcgcacaggagcgtgcagacgaggagctgcgcaactcgctgaccttcctcgacaagtggggcgcggcattcgacagcggcatcggtgcggctatcagcaaccagcttgcgcgcgaggacgagaacatcccggaaggttggaagtacgacccgaaggaatgggagaagtcgtggatgaccgccgacgaactggaagacatccgtgacgctgcgtactcgccgaacgagctgaagtacgtgagcgaccgccagtggatgcgccgcaactccatgcgcatcaaggatcagcagaccggctggtcgagcttcggctacgacctcgtggcaggcttcaccgatccgggcaactgggctatcggcggcgtcaccgctgcgggcgctaaggtgctgggcgtgggttcggctgcgctggtggccgaggggcgtgtgggtgcttcgctcgcatctgccgctgcggagaacgcggtaggctccgtcatcacggacgccgctctggtgggcatgggcgagcgccgcaacttcgcggactttatgaccgacgctgcgttcgctaccaccatcggtaccgcgatgcacattccgggcgttcgctcggctgcgcagattcgggacaaggctaccatcgacctgtccgcaggcaacgctgccgcttacggcgaagcgtggtcggctgacctgaaggcgcgcgcggtggccgagcttggtgacaacgccaacccggtgctggtcaacaaccgcatccaccagcttgccaagcaggaagcagtcgattggctgcgcgctggtatggctgatgtgccggacgacttccgcatcttcgcgcgtcccgacgtgcaggagacgaccaccaccgcaggcaccactggtgcactggctcgtgacgtggacaacgtggacgcctcgaccggccggtacaacgacagcgtgggtggtcgggtagatcagcatgatccgctgctggaacgtgcgtggaaggccgcaggcatccgtggcggcaacgtggacggcgtgctgaagtatctggaatccaacgcctcgatcccagaggacgtgcgtgctatcgccaatgcgctgaagcgcggcggtcgcctgagcacggtgaagatcgtgccggagtcggaactcgacaagtggttcgccggtgccaacatgggtccgggtatgcgagtggccggtggctacaacgccgggctggacgcgatggcgatgcggaactacacgccggaagtggtggtgcacgaaatgctgcatgctgccaccctgcgtgagctgcgcagcaactcggtgttcggtcaggaaatggaagaactgctgacccacatcaacaacagcatcggcagtgtagactccacgctcaccaccgctgcaatggagacgcgcatcaaccagccgcaggcaggcttcctcgccaacaccgacgagctgatttcctacggcctgacgaaccgcgccgtgcaggcggtgctgcgtcagatgcctgcgccgggcaacacccgcccgaatgcgtgggagtggctgaaggacaagatcgcgcgagtgatgggcctgaagaatcaggagtccgctctcgaacgtctgatgtctgtggtcggcgacaacctcggtgctgaagtgcgcgacacgcaggcatcgactcgacagactcgtggcatgctcgccaactcgatcttcaagtcgaaccgcgagcgcaaggcgttctatcagcgcactggtctggacaagtccgtcagcgacgacgcgatgcgcgtgcaggttgccgaggtgatggcgcgctctgagcgcttcagtgccaagtacggcatcgacgcggcgaagctgtccaccatcatgcagcgcttcgggctggaagctacgagcacgaccctgatgtcgtccaagtcgccggtcgctcgtatgcttgctgtcaccctgttggagaacccggagggtgcggcaggccgacacagcacggcggcgatggatcggcatggccggttcgagtcgttcatgggtacgcgcccgcgtcagtgggaagcggcctaccgtctgtggcgcgcggacgttcgcggcatcggtgcgatcaaggacttcgccacgggctggaaggcacgtgcggacttcgagtacgcagtgaagctgtaccgcgagactcgcttcaacggtggggacatcccggatgcgcacgaggcagtgaaggcaatggcccgtgagctggaccgtggctacaaccgcatggcagcagagcagcgcgcggctggtacggtgggcgcacagcgtctgccggaggaagacgtggagggctacgagtcccgcacttggctgggtggcagcatcgctgctgctggtccggttcgccgtgagggtatccgtcaggcaatgcgcgatcagttcgaggtgatgggcgagctgtatggggacgacttcctcgacaagttcgctaccaagtatctggaacgcatcgagcgcaaggcggcgggtatcatcgaagcgccgggtcaggtcttctcggagtcgcaggcggacacgctgcgcgatactctgcgggcgatgtcgctcaacgaggaggagattcagaaggtgatgggcaagtacagccgtggcggtgcgaagcacaccaaggcgcgtatcgacctcgacgtgaccaagcagtacgaagatgctgatggcaagttccgcctgatggactacctcgacaatcgcgtgatggacaactaccgcaagtacgcgggccgtgttgctggtgacatcgctctggctaagcacggcatcctcggtgatgcaggcatcaacgtggctcgcgaagcaatgcgcctgaccggtgcgactgacgtggagctgaaggcgttcgagcaggtgatgtccgagttccttggtcgcccggtgggcactggtgatccgactgttctggcgaatgcgcggctgctgacctcggctatccagctgggcggcgcgggcatcaatcaggcagcggagtacagcaacggcctcgccgctgttggtgctgctggtgtggctgacgcaatccgtatcgctcctcgcatgcgcagcgaaatcatgcgcatcctgaagggcgaggacagcggcaaccaaatcctcgacggcttcgagttcatcagcggtcgcggcttcggcctcgccggttacgatctgcacatgttcaactcgctggacacgcaggcgtcgatgtacggcagcgagcgcgcaggcttcctgacctcgctggtgcagaaggcagcgcatgcaaaccgcatcctctcggggcagcgggctgtgctcgccgtacagcagcgcggcttcgcggaagtgctgatcgccaagggcgtgaagttcctgcgtgatggtgccgaggccgacaccgccctgaaggacatgggcattgacgacaacctgctgaaccgcctgcgggcgacgcaggatcgggtcgtgcgctggggcgctgacggtaagctggaagcggtggacccgcgcaacgtcgaaggactggcggatcggcaggcatggttggcgttctacaacgcgatcaaccgtggcacctcgcagattcttcaggacaccttcatcggcgagactggcaagtgggcgcacaacggctggctgaagctgctgttccagcaccgcacgttctcgctggtcgcacagcagaagcagctgggccgctacgtgggcaactacggtgcgtggcagactgcgggcctgatcgctgcggcgatggccgtggctgcgccgctgcaagccctgcgcgtgctgtcccgcgtggccctgatgaacgatcaggagcgcgacgaagccatcgaccagaacatcctgtcgcctctggcgctgggcaaggccacgctgaactacgtgtcggcgacgggcatgctcaacgatgtgctggacgtgggcaccggtgtggctggtggctggtacgagtacgccaccgatacgcagggtccgacgtggctgaagcagctggccggtgggcagttcggcaaccgcaaggaagtggtgggcgggcagttcgcgcccgcgctgggcgtcgtcaatgacttcgctcaaggcatcgctggcaagccggagaatctggccgacgtgattccgggcgggcgactgcccatggtgatcccgctgttgaagggcgcggccagccagtggaaggaggagtgagaatcagggccaaggacggcccacccttttggtacacctatagcaaacaggaggcagcatggcagttccagacccgcagctgcgctacgcgacagacgtgttcgacgccgatggcgtgaccactgactggcagatcagctttaccggtggctacatcaacccgtcccacgtgtacgcaatgagcggactgttggacgaggagactcagctgctgaccgaccggactccgcacaccgtggaagtcctgagcgaagacgatgacgctagcaccgtccgtgtctcgcctgccgtcgccgctgggcgcaagctctacatctaccgcagcactccggtgcagcagatgctcgttgactacgttaacggtagcatcatcagcaagaccaaccttaacctcagcaacgaccagctcctgaagatcattcaggaaatgttcgactcgctcaacatcgccacccttagcatcgaccaacaggtcggcgtgatcgtggacctgaacgagattatccagaacatctataagcaggtcaccgagttgctggccgctggtggtatcgtgtccgtcgccccgcgcgtctggtccggtgcatggaccggcgatcaggtggacgacaccgacttcgacatggtgggcgcggacgtgtccggcgctggcttctacgacgtgtacgtcaacggaatcggcatgcagccggacgtggactatcaggtcactctggccgacgacaccgatcccagcttcatccgcttcgccacggttcccgccgagggcagcatctggttcgccgtgctgcgtggttacgccaagccctacaccgggcctgcgccgatcactgctacgagcctgcgggtgccgatcatcccggcagaaggtccgacctactacgccgacaaggctaccgagtacggcctcgtgcggtgcacgtatgccggaggctgtgccgtcaacatcaacctgatccccgaagtgggcgacggtgagacgaagcttgcctcgggcagttacttcagcgttcagcagaaggcaggcccggtggtcatcactggcgacgtgggcgtgaccctcgaagtcccggtcggctgcaccgccgcaactcgcggcaccaactccgtcgtcactgcaacgtgcatcgacggcgacaccaacacgtggttgctctcgggcgacttggctaaggagtaagcatggctaatcacttcaggctgtacggccgaccgctgatggcggacgaggttgcagatggcctgtcggtgacgggcgtgctggaagggtacacggcgggcgaggcttacgagtctcgcctgtccatcaacaacccagtcggccgctgcaccgtggaggtcatcgaatcgacgctcccttcgggcgctgcggtacgggtggacaacatcaccaaggaagtcgtcgtcaagtgggcggctttcactgaagtcgtggacgaggaaaccctcgtacccaacggcgacttcgaggcaggcgacgatggcacgtgggttccgggcggtggatcgaacggcgaaggctggtcgattggcactggctcggactacgataccgacagcggcgtatacagcgcgcgcttcgccaacatcaagacgggcggcagcgacttgctcaacccgctgatccccgccaaggtcaacgactacatccgatgcacagccgaagtccagcagggcgcaagctccaagggcaaggcaggtgcgcgggtgtcgatcatctaccgcaaggaagatgggaccgagctacaacgcaactggggcaacatggtttcctccggcagcaacggtgcgtggcaccagtccgttgccgagggcgctgcacccaaggacacgaagtacgtgcaggttgttctctcggcgttccgcagcaagcagaacaagccgctgtgggtggacactgttaagtggaaccacaagtacgtgctgggtcagaacgacgacagctcctacttcctgagcatcaaggtcacggatgggttgaaccgtgtggcctactggtccggtcgtatcgaggagcagggcatctacgttacgtcgaagctctacagcttctaccagttcgatgccgcgatgctgaccagcagctttgctgggtacagcaacatcgacatgctacctcctttggatactgcgtcgctgggttcctccttcgtaagctgggaactgcgcagctcgcgtcaggattacgccgccgaggagagcctttcgtacggtagctctttcgtttcgttcgacatccgatccattcgcaaggactacacacccgacccggagacggcgcgactgtcgagttccttccattccttcaccatgaagcagcaccctgttgtcaatcagccgctcgacgcgactgctcgactccggtccggcttcgtatcatggagcttctcatgatccacaatcacctcggcatcgccggtgtgttcactatcagcaagggcaagtccctcgacgctctggaagttgtcgccgactggcagagcaaccttatcaccgatggtggtatggacgcactgggtgactctggcagcggatacccgcgcagcatgtacgacctcattgcctacttggcagtgggtagtggtagcgcaacccctgcgttcaccgacactgctctcggcgcgcaggttgcacaggttggtcgtacgacttcggataacggcggcaccaccacggccccgtactacgcctactcccgctgccagtaccagttcccggcaggcaccgccactggcgtgctgtccgagctgggtgccaaagcgtacaacagcaataccggcgcttacatcctgtccactcgcgcgcttatcaaggactccgcaggtaacccgaccaccatcacggtgctgtcggatgaaatcctcgtggtcacctacgagctgcgcatgtacgtggacaccacgcccgttgtcactaccgagactatcaagggcgtgagcaccaccgttacctgcaagcccatctccatgggccgtagcggcggcctgaacggccagtcggcagttgtgtggtcggactacgtgtggggctgctactacttcaccggcggcacgggcgatggaactggtgctatcactgaccagtatcctccgggtaacaacgtaagatactcggacttgcagattcagcgggtagagtacattccgggtacctactaccgggattgcgtttgccgcatgtcgatcaacaacgtccccggtagcccgatcacggctgcgatgggcctgtcctcgtgcgttgctttccaagttggattcaatccgggtatcaccaagaccggatcggaaacgtccaacctgcgaatgcgcgtttcgtggagtcgatacacgccatgatcccctctgtctcccaaagcatccaacgtggtgactgggtggagcagcagaaccggcgcacccgcccgctcattgacttcgagcagggcgggctggccctcaacgcggcagtggacaacctccaagccgcgctgtggactgccgaaagtgacggcagcagcgtcgtcgtttaccgcgacggcgttgccccggtcacggtgctgaccgactccgggatcacgcagatcgcactggcattcgaccagaccatgcgcccgcacgtggcgtacatgtcaggcggtgtgtgcaagttctactggtacgacacggtggctgcttcgatgcaaaccatggtgatccccggtgcgaccacaccacgcctgtgcatggacgagaagcgggcgatcttcgccacgcagagcgatgtgcttctgtcgtacaagaacggcagcaacctgtgcgtccgcgcgcagcgtgagcgcttcgcaaccgaacacgtgatcgcctcgggaatccccggcgacctgatcgcggtgggcatgaacaacgtcaaccgcctgcaatggaagctcgtcggcaatcccgacgactggccttaacctacaggagaacagcatgaccccgccgagtgtggtcaatgaggtcgtccgaacctcgccgcttacgctcggcgcggtctacctcaacttcatcagcacgtacggtgctgccatcgtaactacgctcgccattttgtacgccgtcgctcagttctactggcgcgcgcgcgagcaccgcaagatcatgggagggaaggatgtcgaaccccgcaagtgaaggcgcgcttggtgcgctacacgaactcgtcgccacggtactgaaggaacgcctcgccaacggcgagctgtgcaccgctgccgacatcaatgccgcgatcaagttcctgaaggacaacaacatcacggcgacgcgtgaggccaacaaggcgctcggcgaactggaagacgaactcggcaagcactcgctgccgcaggccgacgactccgagcttcaagcagcgctcgacaacatcgtgaactttccggggagcgtagccaaccatgcgtgaatcagccgaagcggcagacatccgtcgccgcaagttggagctgttgcagaaccactaccgccacttcgccaccttcatgcgcgacatcatgaaggtgctggggttcgagccgacgtggatgcagtacgacatcgccaactacatgcagtacggcccgcacctcgcaatggtgcaggcgcagcgaggcgaggcgaagtccaccatcgccgcgatctacgccgtcttctgcttgatccacgatcccactcaccgtgtgctgatcgtatcggcaggcggcacgcaggcatccgagattgctacgctgattcagcgcatcatcctcacggtgccgactttggagtgcatccgcccggacaagaacgcgggcgaccgcacctccgtggatgcgttcgacgtgcaccactcgctgaagggcatcgacaagtccccgagcgtggcgtgtatcggcgtcaccggcaacctgccgggtaagcgcgcagacctgctgatcgcggacgacgtggagtccaacaagaacagccgcactgccgcgaaccgcgagctgctgctgaccatcacgttggagttctcggccatctgcaccggcaagcccggtactcccggccgcatcctgtacctcgggacgccgcagaccggcgactccatctacaacaccctgcccggacgtggctacgacgttcgcatctggcccggtcgttaccctaccccggcacagcgcgagcactacggcccgcatctggcaccgtctatcgtgcagcgcctcgaagctgacccgatgttggcgtttggtggtggtccgatgggcgacgagggccagtgcaccgacgagctgttggccggtgagcagaagcaccagtccgaactgcgtcagcgtgggccgtccagctaccagctgaactacatgctcaacacgcggctgatggatgcgctccgcttcccgctgaagaccgagaacctgatcgtgatccccggtggtggcgaccgcttcccgctgacgatcacccgtggcctgagcaacgcgcaccagcgcagcttccagtccagcgggtacggcttcgtcatgatgatgccgcacgacatgagcaccgagactgccccagtgcagggcgtgcacatgcagatcgacccggccggtggtggtgccaacggagacgagacggcgttcgccgtgaccgccttcctcaactccaccgtgtacgtgttggccgtgggcgctgttcccggtggctacgacggtgacggcctgctcgaactccgccgcatcgcggtgaagtacaagccgaacgtcatcagcatcgaaaagaacatgggctacggcgcgttcgccaaggtgttcctgcctgtgctgcgagaagatcgcggtaccgagaagggatacaagggcgacatccgcgaggagttcgtgaccggcaacaaggaagcccgcatcatcggcacgctcgaacctgtcatggctcgcggctcgctggtcatgctggaatccgtggttgaaatggatcacgagtacactcagcgctacgcatccagcggaaagcgtcaggtctacagcctgttccaccagatggcgaagatcacgcagcagaagggcagcatcgcacacgatgaccgcctcgatgcactggaaggaagcgtgcgccactgggttgcgcagcttgcactggaccagaacaaggccattgccaagcagcagcagcgagagttccaagactggatcaacgatccgaccggcatgaaggcagcgacccgcaagagtccgctgcaacgtggccgtccatccctactcgaccgttaccggaggtaaccaatgcagaagtccgacttcaccagcaactacacgggcctgttcggccgtggcaactacctgcaccgcgaactgctcgccctcgtggagcatgcggagcagcatcccgcaaccgcagcgcagctgctcgcccagttccagaaggacgcgaccctcgtgctcgacgccctgatcgctgccggtgcgcgcacgcagtcctcgggtccgaactccggcccgcacactccggtcgatctggacccggacgatgacccgctgaccccgtaaggagcaaccatgaaccagcagcagaaccaagataccagcaacaaggggctgttcggcctgatcggcggcatcttcatcggcatttcggcaacgctgctgtcattcacccaaggccacgaaggggtacgctacgctgcgtacctcgacaccggccgggtgccgaccatctgctacggccacaccaagggcgtagcgatgggcatgacggcaacgaaggcacagtgcgacaagtggctggtcgaagacctacagatcgcccagaagggcgtgcgtaagcacctgaaggttcccgttaaccgcaaccagatcgacgcctacacggacttcgtgttcaacgtgggcgagaaggcgttcgctgatagcaccatgctgcgcaaggcgaacgcaggggatcgtgaaggtagctgcaaggagttcctgcgctgggtctacgtcggtaagctcgactgccgactgtccagcagccgctgctccggcattcccaagcgccgcgacgcagagtttgccctctgcctgcgccccaacaacgaggtgatccaaccgtggaaaccccaagtgaagtgatcgcacgactcggcggcaaggctatcggcctgctgctggtcgtgaccatgttcgtgtgcttcggtctgtacgtctacggcctgcaacgcaaggtggagaagctggaaactgcccaagtcggcacgaccgctaccgccaaggctgcgcagactcaggctaccgggtacgcaacctacatcaaagagaaggaggatgtgcgtgttcgcaccgaagaagctctcgacgccgttcccgagtatcgtgacggcactgttcctgctgatgtcgctgacctcctgcgcgaacctgccggttcccagcgatgatctactgaaggactgtcacatcacctacctcggtggtgagcgcggcacgtcttccagtcaggacaaggtggtcaagctcgcgcaggaccgccgcatggacaccgttctgtgcaacaaggacaaggccgcgctgcgtgcgtggaaggaagaagtgtgcggtaccggaaagcgccggtgtacgggggacaagtgaccaccatcgcgtgggacgggaagcacctgtgggcggacagtcaggccacacagggcgaccacaagcacaccgtccgcaaaatcctccctgtctcgacacccaccggccctgtgctgctgggtgtcaccggggacttcacagtgcttcgcccggttctcgctgcgcttaaagcgggcgaagggtacgaggagcacgttggcaagtccgccacggtccttgtggttaaggacggcgtactcacggtcactactggtaagcagcagtgggttgaggaggctccgtacttcgatggcagcggcaaggcgctagctctaggggcctatcatgcgagcaagtctgtggctaaggccatggctgccgcgatagctcacgatgtgtatagctccgggcctatcatcaagctaaaggcaccagttcgcaaggcttagtcataaggccacgtggatagccggaccaaaatttgcttcggaaatgcgcgggggtcactccaatagaagctcccgcgcgtgcccccgtacgccctcgcgttacgcgcctgcgggtgcgcccgcctgcgtgctcgcgtgtgcgcctgtgtgcgcgtctgtgcgcccgcgtcaaggttccgcgtgggtgtgtgcctgtgcctgcctgcgcgtggcgtgtgggcgcgcgtgtgcggccgtgcgtgcgcttgcgtgggcgggtgcgcctgctgcctgtatggctggaccgtgctgccgtagctgaatggttaataaatcttccgcgattggtgcttgacggcaggtcgggagtgtggtttcatagcgtcactggggcagcgacagggcctcaggagggccgcaaggggcttgacaggtgcatacctacctgctaccatgcgaaccgcagctgtaggcgtgtgagggccatctgtatcgtttcggccttttggtacacctatagcacacagtcggctcaacctgaatcaccgtctatcggtactctgtcgagctgataagttagctacccgctaggccaacggttgacacacggccgcaatggtagtaagctgcaacgcaagtcgagtgacgtgatccgtagtggcgccgccaacaagtgggctaagggtacatgggagtcactggttagggatgcgaggagctaccgaaccacgcttgacactgagctagcagtgagctatgatagg

SEQ ID NO: 32 - DNA, 44388 bp, unidentified
  misc_feature 1..44388: note = the genomic sequence of a bacteriophage
  source 1..44388: mol_type = unassigned DNA
cctaggcggggtttgttttgcgccacgtccagagtgtcttgccgctatcccacacccgcaaggcccctaccgcgtcctcgatgtcccactcggtgcgcgagtcgttagcggggtcgaacgctgcagaactgccgatctgcaacagccgcgttggtatgtgcttgcgtgcccaggccgacttcggacgaaacccaagcttccggtgatacacccggtaatccggctcgacttcctttgtcgcggtgaacccgagcgcctcatacacgccgcctgcgaaccagtcgtgagcgctgtagctgacgacgctctgtgcgcaaagaacggcgacggcatgcttaaacagcttagacgcacctccacgtacttgtgcactcgtcgcgaaccgcgtcaagtcccacacgcccgacttggtgcggttgcgcgaataggcatccaagttaaacgtcatcaccgccaccaggccgtgcaccgggtgctgcagcccgaatcggcgcgtgtagacccgccccggctgctgcggatggtaggcgtctaggaacgcgattgtttcggcagtcgtaggctccacaatggcgcactggcgcgcgtgcagcttggcatcttgcgagcagcccaacgcgttccggatcaatcgttcaaactgcggacggcgttccttccattcggcgcaggtaacagccagcaaccgatagcccgcggccgcgacagccgtccgtttatcgcgccccgccgtttttgagctgcgccggtcggagtgccagtacaccccgttcagttcaatagcgatgcgcgccgagggcacaacgatgtcgagttccttcggcgcaatcagtttccggtcagaaccgtaggcgtctgatttaagtgattgcacgaatgccagcaaatcacgttcggatggtgacgggccaaacttaccgcagcgcgggcagccgtggccgatcaagtgattgtttgcaatttgctgaaacggcccgtgctcgcgacagtgaattgtcactcgctcggtcgaacgcgagtagtcatcgatcgaatagtcgtagcggtcgccatgcactgcgcgcgccctcgcggcaaagtcggcctgcgtgaagaaccccggtgccgaagtttcacgtccgcacgccgggcagcccgaacccgcaacatgtgcgcccgctttctgcgtgaagcccccgtgcttggggcaaatgatcgacaccgtgcccagtgcgtgcgtgtacagcgtctgcgcatagtcgtagcgagcgccgtgcactgcgcgtgctctggcgatgaagtcctccgccgcggccgtgcgccgtgcgaggccacgctcggcagccgcgcacgccgggcagccctgaccgccgtttgcgtggtgtgccggcgtttgccggaacgggccgtgcgtgcgacaaactatcgatacaggatcgtcggcccgaacgtactcgacggccgaatagtcgtagcggtcgccgtggaccactcgagctttttcgatgaacgcgccgaggccttttcgctgcgtcaaactgcgagcccgaaggccgcagtcggggcagccttgcccagcgcgatgtttgtccggcgtctgcatgaatgcgccatgttcgcggcacacaatgcgcaccggcgttcgcgcatcgatgacctctgcggggtagtcgtagcgggtgccgtgagtgtgccggaaacgcaccaaccatccgtcgtgtgggatcttgcgagacatacttactccagatacgtgaggtgaactttaatcgcacccgacacgcaatgcaagcgccgtattcgtgtatcatcgcacgcgtaaaccacacctacaggaacaattgcaatggctcgcaaccgcaacgacagcaaccaaccgtccgacagcgccggcaccgtcaccatcgcgtgccgcctgcctgcgggcatgcgcttcgagaatgttcccggcatgccgggcggtgtgctgatgatccgcggcagcaacgacgactgggcgctcaagatgatcgaagagtacgaagcgcacggcctgaccagtggcgtaccggccgaagcgtgggactacatcgccaaccacccgtactacagcaaggccaagtggtacaccagtggcgccgtgtttgcgaccaccaaggccaaggatgcgatcaaggaaacccaagagcgcggccagaccaagaccggcttcgaagcgctggaccccgaagaactgccgggcaagatcgaagacgccgtcaaggccgaagccaagcgtaattgaccggagtagcgcatcatggccgtcgttgtctttgaccccgcagcattcaaagccgcgttcccagagttcgcgacggtccctgatgcgcgcttgaatatcctgttcctctctgcgaccggcgtcatcgacaacaccgatgcatcggtcatcgcggatgtggcgcgtcgctccgcgattttgtcgctggtcgtggcgcacctgctcgcgcagttcggtacgactgtcgtcggcaccggcggggcgaacccgtccggggtcgtcggtcggttgtccagcgcgaccgagggctcggtgtcctcgtccttcgagttcaacattccggcgtctgctggcgcggcgtggtggaaccagacccagtacggcgcaatggcttggatgttgctcgccccgtttcggtcgttccgttacgtggcgatcggccattccggcgagggctatgcccacgcgttcgccgatcggcgcctgtaccccgagggcgcgcagttgctgtccgaaaacagcgggacgcccaacggcgtatgaccaccgtccggcgctcgggtgtcaaactcccttcgcacatgcgcgagcagttcgtgcccgcgagcgtcaaggcaggcgtgctcgagggcgcgacatacccacaggatacatacaccgatcaccgtaccggccagcaagtcgccgatgcccgcggcgggatgcccgttgcggcaatcgctcaggcgctcgaatacggtcatgggcagaaccatccgcgcccgttcgtgcagtcgacattcgccgcgcagaatctcgcctggtcgcgtggtttgacccagttgatcaaggcgggcgcggcgaccgacacggccctgcgcacgattggactacgcatggccgaagacctacagcagacgatccgcgactggcctgcggacaactccgaggattgggcggcggtcaagggcttctcacatggcttgatttttacgggacatctgaccaattctattgactcggctgttgtgctgcgcgacggcgactacggcgaggatccaagcccgtgagcggcctgaacctacacgcgatcgtgcgtggcgctatccagacggtcaatcccgatgtaccgggtgacgtctacatatcgactggcgccacgacggccggcggcatccgtacaccgacgttcggcatgctgccggcccaacgcctgcaagtgcaggcgatgtcgcatgaggatctgtaccacctcggcgggttggccttcgcaggcaacatgcagaagctctacgcgtacgggcagtttgccggcatcgtgcgtcccgacggtaagggcggcgacgtggtgcgactcggcaccgaatggtgggttgtccagcacgtgctcgagtggtggcccggctggtgcagcgtatcgatcacccggcaggtcaacgccgcgacgttggacgcgctgacgaaggcgttagccaacggcgcggtgccgaccttgggggtgtcctgatggccgccgcgctacttaccccgaacgaagaccagaccttcgcggcgctgttcgacttcatttccaaggtgctgggcctcccctacgacaccgaccagatcgtcaaggggtttcagaaccttgtcgcgacgccgaccggtagctatgtggtcgtgtccccggggatcatgcagcgtcaggattttggacgccgcggctacgatccggacggcaacgcgacgatcgtcggtgcgcaccagacttacagctatcaggtggactgttacggccccgaaggtccgacctgggcgtcagtgctgcacgctgcgtggcgcacgatgtgggccgtggacaacatgccgtctggggtgctgatgcccctgcactcggacgcaccacagcagcttaacgttgtcaacagcgaaggccagttcgaacagcgtttcatgatccggctgttcggccaggtcaaccagcaagtcacgctgccgcaagactttttcgacgtggcgactttggattccatcattgtcgccgatcaactatgattggcatatccgaccggagagcgtgacccgtggcaaatatccctatttcgcaaatcgtaaccgtcaacccggcggtcgtcagcgcgggcgggccgcagacctcgctcgacggtctgttcctgacgcagtctacggccgtggcgccgggccagctgcagccattctacagcgccgccgccgtgactggcttcttcggtgcaggctccgacgagtccactgccgcgcaggtctacttcgccggcgttctcaatggcggccagttgccggcgactctgacgttcgcgcgctacgctcaggccgcgacctcggcccaggttatcggcgcaccgaccggcctgaccctggcgcagctgcaggcgctatccggtacgctgattgtcacgaccgacacccaacgcacctcgagcgcaatcaaccttgcggccgccacgtcgtttgccgatgctgccgcgcgcatgacggccggtttcaccacgccgaacttcgcgatcacttacgacaacgcgcgcgaccggttcgttttgtcgaccaccgcgaccggtactgcagcgaccacgtcggcgatcaccggcacgcttgcctccgccgtcggactatccgctgcggcgggtgcatttctgcaagccaccggtctgcccgccgatacggccggcaccgcgatggaccgcgcgaccgtgctatcgaccaactgggcgatcttctcgaccatttgggcagcgacgctagccgagcgcaccgcactggcggcgtggaacagcgccaacgggcagaaccagttcatctacgtgggctgggacaccgaagcggcgagcatcgtccccaacaacgcgtccagcttcggcggcgtggtgttcaacactccgtatacgggcaccgtgccgctgtacggcggcctggtgcacgcagcaggtgtgatggcgtgggcgggcgcgacgacctacgacgtggtcgacggacgcaacgcgctagcgttccgtcagctcggcgcaggcgcgacgccgtcggtcaccaacttggtggccaccgcgaacgcgctgctgaccaacggctatacctactacggtagctacgccaacagcgccaacaactacagcatctactacaacggcgccctgtccggcgcgttcgactggtccgacacctatctcggccagatctggctgcgccgtacgctgcagcaggcgctgttcgaaaccctgttggcgtacaactcgctgccctacaacgcggatggttacaacgcgatctaccagggcgcacaggccacgatcctgcaggcgaccgccgccggcatcatccgcgaaggcgtgacactgtcgccgtcccagcgcgcgcaggtcaaccagcaggcgcgcctgcagatcgacgaccagttgtcgacggtcggctggtacctgcaggtcagcgacccgctgaacgccagtgtgcgcaccgaacgtggctctccggtcgtcaaattctggtactgcgatggtggcagcatccagaaaatcgacatctcttccaccaccgttctctaagaggcgtcgtcatggctgctaccctcaccgttgcaaattcctcgatcgcgatcaccgtcgagtcgttgtacccctcgtcggtgctgctgtcgggctacgccgcggacaacgtgttcgagacctcggcggtcgtgaacaaagagacctcgatgggcatcgacggcaagttctcggccggcttcgtctacaacgagatcccgttcactctcaccctgcaagccgacagtccgtcgctcatcatcttcgagcagatctggcagtacgagcagaccaaccgcaccggcctcgatgtcggcatgaccgtgacgctgccgtccaacggcaagcgctacggcttgcagaatggctacatgacgtccttccgggcgccgagtggccagcgcatcctgcagccggccgcgatcgagttccgcttcggtcggatgacgtttgcgcgcacctgattctcggtgcggtaaggcaagaaacaacaaagcccgctttcgcgggctttgttgcgactgggctctcccggtcagtcacgtgctggctgcgccttgcggcgctgcgacaacacgtttattcgacgtgtcatcaaatccgggccagcccggcgaggtgcttgtagcgctatcctgtagcgctatcccgatgagcaatgcgcggacgcatcttacaccacagcgcacgtgctggggaactgcgaggacgttacttgccgaacagttccaggcaggcgcgcagcaactggcgctgttccggctgcagcttctgcatcggcacgccagcgatgccgactgcggccttgatcgcgtcgatcgtcgcgacgctatgggccgagatgaaatcgcgtgcgatactcaacagcggcagcaacgcggcgtcggtcgccggtgcagcgtcagtcgccgcggcgatcagcagcccgagcgcttcgtcgtccagaccgggcacagccggcgatgcggcatcgggttcgtcgaccggcagcgtgtgcgtctcggtcgtttccggaacttcgggttctgcaccaggctcgttagcctttgcgttgtcggcttcgatctgcgccttggtacggcgcgggcgcttgggtttctcctcgaccggcgcctccggcgggtcgatatcggacggcaggccatcgccgtcgccaggctccaggatgcggtcttcgtcgggcacgtcgacacgctcgatcttcaagtcattgatgacgactcgcggaccgacctgcaaaaacgcggggttgagaatagcgacgaactccgcgagctcatcgatcgacttgaagttcagctccatgggttactccgtggttgtgggtttgcggcgcggtcgacgcagtgatcgggtggtgtattcggtgaccagctggccgcggtacttcgcctcgtcgcgccgtacctcgtcctgcagcacctgcatgcgctcgcggctggtgacacgccggtagcgcatggtgcgcacctgctcctcggaaatgccgagcaggcgcgcggtgttagcgtgcatgccgatcgcatcggtcagctcgcgcagggtccaagcttcgatcggcttggtgaaatagtcggacgggtcacacgttgtttcgggggcagccatttggtcagtctcgttgcggtttgcgataagttacgcgctggtgcgctaatagtcaacccgccgtagtgttgcggtggtagccgccgtccggcaagtgtcgatggcggaacgtctcgaagttgattagtttgtttgccgcgacatatgcagcacctgcacatcgtcgcgagtcaccctcgcgaagcgattcgtaccagatgtcaaacttacggccacttcgagcgtcgagggccgccccaagttgccaagcgatgtataacgcgcttacatcgtgatgacgccaggcccacggggctagatcgaccggcacgtaccgatcgttcgcgatgtcgagcaacaagtcggcggggtacacgtacaccaggccgtagcgcaccacgaacaccggagtgtcgggatgcaacgaagcgagcggtgcatcgaggggtttgcagagcatcacggctcctccgggtaagtgcagatcatctggttggcttccatcgcgcaccgcgtctggcgctccagcacgtggcgctgcaacggcaaatcaaagtccatgacgtactcgcggaacagcgagtcgtcggcgttgtagacctctacgcgtaccattagcatgtggatgtctccgtggttgtggtgaatcaaacgtaacgcacaagttacggcttgtcaatcctttcgccaccgatccgaaacgaatcccgcagcgtccagcggcaggcccggcgcccaccgcggcgcgacgcgcagccgcgcgagcaactggcccaagcgcacctcggcccggtcgcgcggcacttcgaggatcacttcgtcgtagacgtggtggacgatcttctcagccggcgcgatgtcgagcatcgcctgccagaacagatcgcgcgctaggccctggaccatgttgttcgacaggatcttgcggtctagcgtctcgacgaagccttcgggcttgtcgtagacggcgagcggtgcagaagcgcccggttccagcacgagacgcgcattgtggtagctgatcgcgcgacccgagggcaggatcatgcgcaacgccgcggagtccttgacgaacgtcacctccgagcacatgccgcgcccgatcggcatgcggacctgtcggccgggttgatctagtgcgatcagcaccgcgtactcgagggcggcccaccagatggccatcttggagtggttctcgcggtacttccagacgagtttcttacgcaggtcgtcttccaggtacttgccgtagttgcgcgccatgttgtcgagcgcaccgtcgccgccaccgtactgcagcgacaggcgaacgaccttgccgatctggcgctgatccttatccacgttttcgacaggcacttcgaacacgccgctcgcttcgaccacgtagccgtcgatgccctcctcgaactcgactagcatctcctcgtcatctgcgcaccacggtcccaagcgcgcctcgatgcccgcaaggtcggcgcacaccaacgtgtgctcggggtaggtcgcgcagaacagcgggcgctgcgcgtccgccatagcggctagcggcggcccgacctccggctgcgacaggaaatcgaagtcgtcacgcgttgcggcggcgagatacgcttcgcacgcttcggctttgcggcccgggcggggccgcgccacgttgagaagctgagcgtcaccgcagcccatcgccgtagatcggccggacagtgcgccgtggtagaccgtgctgtgcatcatgcggccatcgacgtgcgcgcgcaggatcgcgcccgacttcttcggtgcccggctcgcgtccagacgcagcgcgagcacgtcgcgcagcgccggcggcagcgtgtcgcggctcaacagccccttgaccgtctcgcgcccggcgtcgtccatgtcctcgcccagcgtcgacgcgaacgcgcggatcttttgcacctcgctggccgatagcagcttaccgtcagtggcggcggtcaactcgtagtcgatcagcgcctcggccaactcgcgcatacgctccataccctcggcgccggccacgtcgcagccgaagccgcggtcgttgacctcgtagtcgagttgccagaattgctgctcgaggtcgggcattggcaccgtcgcctcccacagcgcgaccatcgcgttcgtgtcggtcaacgcgtacttgtaggtatgccgaaagtgctccggatgcgtgacgggcgtccactccgggtgcaccatcaactctttcatccacttggccccctcggtgtctttctgcaccgctaggccgagggctgcgcacgcacgctccagcgagcccggcaagccgttgtatcgggcgcgcgccgcactgcactgcacctggcgcacgtccagcatcggcacttcctggccagacgcacggagagctcgtgcgtgcggcccgttccacatgcccagatcgaacccggcgttatgcgcgacgaagcgcttacgcgcttcgatgtgctggttgacttggcgtggcacgggcttaccgtactcccacaggtcggcggtgcgcatgccgggcagaacgaacgtgaagcagtacgcacgggtcgacggatcgcgtaggtagcgtgccaagccgtggcgcttcaagtcgcacagcgatgcagcctcgaagtcgaggaacagagtgtcggtgttaggggtcatgtgggcttctcgttgtgtgggtagcgcagatgttacatcactgcgcggatgaattgcgccgcgacttcgggaacgattgcattgccgtaaccacgcagcgctgccacgcgggtgggtaccccatgagccagcgggaatgatccgggttcaactggcctgcgctttccatccctgcatccgagccaatcagcacctgtccagaagccgtgtagcggatcggttgcgctagccaagccactcttcccaacagcgcattcgtgggtacgttgtcgcatcgggacccgtccttccaatctcgtgctgttgcggctggccagcccgccagacacgcagccgctgccaagtccggcccgtgattgcgcatcgcttcctgcaacccgccctcgaatgtccgcacgcccttgtcggccagcgccgccgttggcgtgggccacccagtagagtcgctggcggatgtgcggcgcgccgacgcccgcagcgcacagatcggccgccccaacggcgtaggccgcaccttccaggtcagcgcatacaaggtcgagccagttgaggccgtcgaggcttgcaacctgctcgccaaaaacgcttggagggcggcactgttcaatgagccagtggaatgcgggccagaggtgccgctcgtcagcaaacccagctcctttgcctgccgcgctgaaaggctggcaagggcagctgccagtccagactcttcggtctgcgggccacccggcgagctggagggcgagtggccatccgccgatgccggcgaagaagtggcattgtgtgtatccgcgtaggtcatttggggttacgtcctcgatactgcgggtgtcaatctcgcacggtgggatcaatccttcgtctcgcaactcggctaaccacgctgcggctttcaggtcgtattcgttgaggtagttcatgtgggccctaaatcctatttgtaagccggatcatattggaaagtcgccatttgtccgtcacgcacaaatcgtacgtgagtgagccaaacaagtccatcctcgaacttggtgaacgtgatctccgtcggttgcgggatcaggtcgcgctgcagcaacacgcggtgcggctccttcggcagatcacggcccgtcgatacctcgaagtatttccgggcctgggcgaagaagcggttatcggcggtgcgccggtcgaagtccagacgcagctggtaggtgccaaccgccgtctcgtagtggaatgtgaggatgctttcgccctcaggcaccgagtaggaatggtccaccggaacactgcgggtctccacgcacagctcgtcgcgcaggatgatcgaatcctcgtcgtgcaggtcgtagctgtctccgatgccggagtgcgggtcttgcggttcgggcttgcgcgactgggtgacgaacccctggcgcggacggttgcagtttcggcacgtcatgtgctcggggtcgtttaggtagccgcacccaggctcgtcggagtccatcagccccagcacgacgcgcaagtcgcgttcctcgatgtcggggctgggtgtcgggaaacggatgccgctgcgctcgcgctggaccgcaatccctggtgcatccacgcgctcggcgctgcactcccacaagccggcccgtgagtcaccctgttcgagatccgcattgatcgggccgagccggtcgaagttgccgccggcgtccagcaccaagcagttctctttgccggcatacgggcgaaagccgcgcccgacgatctgacggaacaacacctgcgagcgggtggcgcggacgatcacgatcgcgtcgacgaacggggcattaaacccggtcgtcagcgtgcccaccgacacgatgtgccgcgtttccttggccaggtattcgcggataccctcgacacgttcgcccttgtcgagatcgccgtaaatcagcgtcaccgtctcgccggcagccaggagcgcggcgcgcatcatgcgcgcatgttcgacgttgacgccgaaccacatcacgtggtcgcggccgaccaagttttccagaccgacggcaatcacctcggcggtgactttcatcgcagcagcagccagctgcttctcgtcgaaatcctcgcccgaggtcttgacccccgcgacgtcgatctgcgggaagcgcaccgtcggtgcgacgatcggtgcgatgtagccctcgcgcaccaagcgattgaacagccgcccggtcgtcaggtcgtataccttggcattgaacaatccgcactgcgacagcggcaccgtcttcacgcctttctgacggaacggcgttgcggtcagcgcaatgaaccgaacgtgcgggttttgctcgcgcgcaccttcgaccagtttgcgaatcgacggcaacgacaggtcgaagccgtgcgcctcgtcgacaatgatgtagtcgatcggcccgaaccggcggatctgacgccacaccgactgttgcgtgccgaacgtgatcttgcgctgacgatccttacggttgagcgcggcgcagtatacgccgatgcccgacacgagggttgcagacaggtatgacgacgcttcgtcgcggttctgcccgaccagctcttgcgacggggccaggatcatcacacgcgcgctgggctgggtggctatcagtttttcagccagcatcgcggcgaccagcgacttgccgccgccggtgacgatcgccgcgatggggtgcacgttacgcgcagcttgcagagcggcgacaacagcattcgccgcctcgtcctggtaccaacggggcgtctttcttgtctgtgagggcatgggcgtggggtctaaggttaaacgaacatgacccggatgttaccgggtcatatggagtcagtcaataacacggggtggccggcgtcgcgtaggcgcgaatgcgacgcacccaatacgcatgaccttgcggtgtcggtcgccacacaaacgcgtggcgcaagctgtcgcacgccaaccctcttggcgatatccatcacagggccgccttgcagtcgcggatcagctgttcgagccaagctgcgcgagccgccatcgacgcattcgcccgaaagccctttcggcgctgccactggcccaaaaacatagcagggccacccagcgcgcggccgattagattgcaacaatcgttccgtgcatgggaaaaacgcgccccgtagcgcacttcactcgccgcaccaagggcgctacaaataccggccccgcggcgaatagcggcgggtaggtatacttttgcgtcctcgaaaagttggatcatcgcccggatgcgggctttctgctcgtcggtatactgaatgtccatggtggtatgtcctgtgggctgtggtgattaacgcttgactttcttcatgtagccggtgcgcgggcaggcttgccgctcggcatagatcggcttgatcacccgggcaagcgcgccgggattgaacgcgcgccaagggtgactagacttcggcttggtggcggtcatttgactgccccgagtcgatcgatacagtccgccgtagcggcacgcttgttgtcgcgatcgacgatcgcgtaagccgcctgggtgtaggcgccgacccagtcggataggtcagtcgacacgggcggcggatccagcgcaatcgcggcggtccgctgttcgcacagcacacgcgcttgcgcggcttgcttcccaggcacggagcgcgacgtcgcgcatccgctggaaacgctcagcgtcagtagtagcaggatcagtcttaacatgggcgatttcctgttgggcattggtcagttgggtccgggtgtcggtggtctcggcgtcgacgcgcatgcgaatgtcgtagccgatggtgatcgcctcggcctggtaggccaccgcttctttggtgacctgcaggtcggcttcggtggtcgcgtcccgtgcccccttggcgtacagccagtacaggccgcccaggaccgcggctacgaggacggtgtagatgatggcgcggattgggatagggctcatagcttcgggtccaaataacgaaaggcgagcaaacctgcgtcgacgatgccccttggcggcaaagtcttggcgaaatccagtatccgccgcagggcttcgagggtctggaatggcaaaactatcgctgcccggtcgtcgtggatatggtcgctcatggtcgatccagtattttcgccaacatgcggtctgtacacccacgacactcgaactcgccatcggtgcgaagtctaaacccggctctgcgcgcatcttctgtcatgccacgcaccgggatgcgccctgcgcgcacgaattcaccgggcccggcccgggcgcactcgtgacacaccggctctacccagaacttagcggcgctcatcgcgcacccgccattccgtaagcgccgcacagtcggcccatcgtgtagtccgcattcgtccccgcgctagcgggcaaccagtcggcctcgacgtccaccgcttcgccgaaccgttctacctgcaccagcaggaagcgccaattctggcaatcgaacacgtaccggccgggcgcccactcacccaacgcattctggtgccgggtccaggcgaggatctgactgtcggcctggcgaatcgtcgaggcttgcacctgcacgccttggccgatcgcatgccaacccaacgggctgacggtctgtgcgtttgcgcccgaaccgagcaacagcgcggccagtgccgcgtaccaacgggacttgagtttcatcaggacaccatgtcgaggatgcgggcgacggtgcgcagagcgatcgtcacgaggattgtaatcgttaggccggtcgccagcatcgcaccgaccagtcggcccgggtgcgggtggcgccgacgggcctgcgggccgcgtggtgcgcggacgccgtacggattggggatcgaggtgttcatggcttatccttgatttcgattagggtgtctagccaattaggtgcacacagtgaagccctaaacggcgaccacgctttgcctcgcacgctcagccagatactggaaccagacacaggtcgcgactcgaatagataccagcgaccatctgcgtcttgtgcagcccactgcgcccaatccggcacatcgacgggcttaccatcgagaaccagaatcccgggcgccacctccacacacgctacgcactcccccgccaacgcagcatatgctgctaggtcgacgtagtcgtcgagcttgccggccgacgtggcgaacgcccgggcttgtttcagtacggtcatgaacagccagccgtcgcgctcggttagggcatacccagacagcgcgttgaacgcggcgacggtgcgcgccatcgagcgttcgccgcccggctggtcgcgctctgcggcgcggtcgtcgatggtctgcgcggactggcgcaggatgtcggaagcggtaggcatggctcaagcctccagcttcgacaggctggaaaacaacgcagctcgttcttcgatccacgccgccgcctccgccgccgcccgcgccgactgcgccgccgccgactgtgccgaccgcgcagccgaccacgcctccgccgtcaccgattccgccgccgattccgccgccgactccgtcgtcgactccgccgccgactgtgccgactccgccgccgaccaggccgaccgtgccgccgaccaggccgaccacgcagccgaccaggccgactccgccgccgagcgcgccgagcgcgccgccgagcgcgccgactgcgccgccgactccgtcgccgaccacgctgccgactccgccgccgactgcgccgactgcgccatcgccgactgcgccgaccgcgccaccgaccaggccgaccgtgccgccgactccgccgccgaccacgccgactgtgctgccgactgtgctgccgactgcgccgactccgccgccgactcgacgccatccacacctgcagcgccttcgtggaatcggcggccaacctcgagggcggagacgacctgtgcaattgcgtgagtaacttggtcgggatgatcggccaacaaggcggcgcgctgcgtcaccagcatcctgtcgattcgcgcaatggcgatgagatgcggcagcggggccaggtccacgccgaccgggatgcgctttgcaagctcgacgtggaagctgccacgctcagctgccggcaagccctcgaacatcgagtcctgcaggcggatcaaccattccggcagggcgcgcgcatccgccacggttgcgtgaaagctagtgctatccgggtcgatctcgtgagcgaagcagccgaccgagcagccgcggaattggccgtcgtgcatctcgccaaacgtgccagagaccagcatgtcctgtgcttcgtgccgctcagcctgagcaacgtgtagtgccttgagtgccggatcgttattgaaagaaagctgtgccatgtggctgtctcgtcgtgggtgtgggcttagtatgtcacttacggtttacttctgcaagcgcgttttcgatgtcgcgcatcacagtatcgatcggcaccgtacggtcgtagatgccgatcggcgtcccgcccgggtgcccgtacagggcgtgcgcggtagcgccacgttgtgagacgcaaatcacgtaccggccgtacttggagcgcatatgggagattctggcgcgcattaggaccgccagtgccggtcggcgtttcgcgactgcaccccgaccatcgcggcacgcgtcgcggggtgacgactgaaagcctcgatcagcacatcgcgggtgtacgacttctcggatgaccaggctttgccgacgaccggcaccacgccagtcggacgcttccagatcctgacgaccaggctgcagtccttgcctagcctggacagcgtgccacggtcgagcgtgacgccggggagccactgggccgcctgttcgacggtccacatcggttcttgcgtgaatgcattcattgtgggcaaatcctctgtgggttacagggtgaacgcgcagccgaccagtgccagcagcgacagggcgacgctagcggttgcgccgcaggtcatcgcagtgatcgtgcggtcggcattcggcgccacgaaggacagcacgaagccgaggacgataaggaccagggcgatagcgccgaaagctacggggatcaagatcggatcgaacatgtgggtgtctcgacggtgtgggactagaatcccacatgctatcccccatgtcaaccaaaagttacatcgattttaactatcgaatagcgccaaacgggttgatcggtatgacgttgtcttcggcaggctcccaaccctccggggcgcggtagacgcgcaagccacgtgcgtcctgggtcgcaacccacccgcgcgtcttgagccacgcggcggcctggcgcgcgctgaacttacggcccgagggcgttgcgtccagcgcggtgcgaatctccagcgagccgacacggcccgtctttgcgccgaatttactcaggatcggcggtagcaggtcgtcgagatccgaatcgaccgtaccgcggcccgagcgcatgtcctcggcgttgtacgctttgaccagctcgggcaccgaccgtaccagcttggtgtactcggcccaggaatcgcaaaaacgggctttggcttcggccaggatctgcggcaactcgacggcccaatccagcgggggtgctgtctcgcagagcacgggcatgaagcggctgttgccggtctcgtcgcgattgagctcgtgtttgtttgcggtgccgaacagcacgtaccgccgtgggtgcgacacctcgcggcgatcgtacggtgcgcggtagacgtcctgcgtgtcggttgtccagcgcttgacgtcctcgacctcgcgcttgcccaggcccgacatttcgcacaactcggcgaccggcgaccgcgcggcggccatcgccattttgcgatcctcggtgaacgcaatttccgagggtagcggcacgcccatcgcctcggcgatctgcacgccgaacaggcccttacccttgcgttgctcgccaatcagtaccggcaccaccgggcacggggcgccggggcgcagctggcgcatcaccaagccggcgaagaagacctgaccggccccagtcaatgccgggctgcctggcgtgccgtacaagtccgtgaaaatggtatccagacgggcccgcttgtcccagacgggcaacgacaagacggcgtctttccacgggtcgaccggtcggccgcgtgccacagtctccagcgcggtttgcaacgtgccgactgaaaccgtggaggcgccaagacgggtgacagcttcgagccacatgccgatcgacggcaagtcctcgtcgttgagcttgtcggcgcagacgtcgtaggtgagcatgagaccggcttcacgcgcgagcagcttggtggcgaacaccagattctgcacgctgctgtggcgtttgtcggcgcggtcgggccattcctcgatcgtgccgcacagccgttcggccgcaagctcgagcgggtgtgatagctccgacgcatccgactccccgaaggcaaagaaatcccccagcttgtgcgaccacacgcccttgacaccgcgcagcgtgaccacctcggcggcgcgcaaatcgccacccgacaaatcgtgtcgggtggagtcgaacggatcggcgcaccgccggccagtggcttggtcgaaatgacgcattgcatcgccgaccgtcatgcgcagcggttcgggcgtgtgttcgaacaccagcggccaggacggcgggagcaccttgtcgcccagcgcgcgcagcgcaagagcgcccatacggtcgccgtcgtcgcgaccggccgctaacgcgttggctttgtggtagtccagtgcaacgcgcttggcctcgacgcgcatgttgttcttggcctgacgcaccgcagtttcgaaacgacgaatcgcgatatcacgcaccgccggcatctcttggacgtcgagaaacccttcattggtgcggtatttcgcgctcttggaggtatccgacgaacgcgcgacccacgcatgcgcgtcgggcacgttgcgcgcgatgccgtcgtttagcacgggtgccgcttcgaacatcagccgggacggttgatagaccagtgcgtcggaaagctggcgcaccagcaacgcgccggagcgcgacacgatgatgcggccgcggccggcggcccattgatcgatctgcagccgttgcgcaagcgcggggatgtcggtgccacgggtgacgccaaggtagatgtgaacgccgcgcagtccgcgatcggcgacgtacgaggatgccgaggggcgaccgacgcgcaatgcctggcgcagccacggagaagccgactccagcgcgtccatcacttcctcgactgagctgtagaccgaggtctcggtgtcgacatcgatcaggaacaaccccggggcatccgagtagcggaacgcttcattggtccgagccaccgcgtgtgggttgaactcggagccgcgtcgagtcgtgagcggcgtgttgccgacgatcggcaggcctgccgtgatcgcgtgatgcggttcgaggttgtccagaacggtgcgcaagtccagcagtgacgcgacttcgcgcacttcggcgaagccttcggtcatgtgcgcgattgccgagctcgtgaccttgccgtctttgagctcgaacgacttggccaactcacaagacgtcgaggtgatcagggtgaagcgaatcgggggtgttggggcgtggtcaggcatgtggtcgctctgtcatgtgggtgacgggtgtgtgcaggtcagtctgcgcttggttgtggggggctgtccagctctgcgccgactagccacataaaacgggcagtgagcccgagctgacgtcgcgggtaaccagcggtacggagtgaacgtccggtcgcgatggcctcgcctttggctggtgactgtttgcggatcagcaaaaacagctcctgcaccgagaaccagcctgcgttggtagaaccgaaggcagccacctcggccagcgtgagggggccgccggctttgttgggcttctcgaagttgacggtcaacacgcgccacccggcctccgcgttgacttcctgggcgtacatctgggctttggcgacgatatccatgtggtttcctgggttgtgaggtgcagtcgctaccttacatatccacagggcagttgtcaacccaaggtcaactattcacgcaatagtgaaccaaacgtactagatgccagaggataaagctcttaattctctatatttaatgccaatgaaaaaaaggaaatttaagtcgatataattcttttgatttcacgttttagatatagagaggtttgttggtactttgcgtctgttcctctgcgtcgtgtacttttggttcatgtggtgcgcgagcgtcctctagcattgacggggtccgcagcggcaagtaacctcgcgcgcatggcaaacgacacgctcgcattggacccggcagtttgggatctgacactggacgcctacggcaacgtcgcgacggtcggagacgacaccgcgcaagacgtgcaaaccgggccgggcctgcgcctggctcaagacgtagcgacccgtacgcgggcctggcgcggcgaggtctacttcgacaccgcccagggcatcgactacgacgcgtacctgggtacagctccgctggtcggccagctgcaatctgactttcaaaccgaggcactcaaggtgcccgggtgcgcgacggccttggcgaacttcgacctggcccgtacgccgcgagtgctctccggcacgttgctgctgtcggatcaggccggtaacggtgcgcaggtcgcggtatgagcttgcagcagattcccgtgcagcaaagcgcaaaccaagcgttctccgtcgtgctggatgaccgcaacgtacagatgacgctgcgcactacggaaactggactctacatctcggtgctttccgacggcatcccagtggtgactgggcgccgctgtctggaccgcaccaacctgattccgtccggcgcctatctgggcataccgaacgcgttgttcttcgccgatctgcaaggtgaagcggaccccgtgttcgcggagtttggcacgcgcttcgttctgctttacggcgacccggcggcaaatggggcgacagtcgtgccgacgcgaccctcaggtgcgacggcgcgcccaattaacgaaatggcactgctctatgatggcgcagcgtcgtacaatggcgagtactacttcggagcaacgtagtgtcaacgatcccagaattcccgggcagcgttccggtgccgatgatccaaccggatgatcgggtacttggcggacctgcgggggctgcgaacaagcaggcgattgcgctgatggaaaatgccgggatcctgtacgacacagtgaccgccgcgacccaactcgcaacgactgctgcatcggcggcccagaccgcagcgactaccgcatcgacggcggcaagtactgcgaccgcggcggcaagtactgccagcgccgcacagactgcagcccaatcggctgcacaaactgcgaccgcggcccagaccgcagcgggcgccgcggacagcaaagcgaccgccgcacagacgcaagcgggtgcggcagcgacgacggccggctcggcagatagcaaagcgacggccgcgctcaccgcggcgcagtccaaatcgacgcgctacgacctgggcactgtcaacgtctcctattccgcggccttggcgctcggcgcgggcgctcgtagtgtcgttgtgccctgcccgggcgccatggtcggcgacgcggtgttcgttgcggcaactggtgcgattccggacggctacgcggtcggcgccgcccagtgcctcgtcgccgatacgatccgtgtgtcgattgtgcaccccgccttggtcctcggggcgaatttcacgatcccagtgaaggcgttcgcactgcgctaggcgcttgacaaccgcgcacgctgcgtgcaacctgtcgttgccgcaaatgtgggcggtccgtgggtgtggttgggccggggcgtgtgggcgccccggcccattttatttggagccatgccgtgctcaagcaactcacagtcaatctgaccggcgctgatgctgggcgcccgattaccctcatagagcgacctgcgctcgtcgcagaccgtctagcgcgcgctgcattggccgaagcaggcgcgcctctcgccgggggcgtcatcggcttggtgttcgagcacatgggcgcagtgcgccagctcggtgagcgatccaacgcactgctgcagccgttcgtagacgccgaccggcagccgttgggctgggagaacgtgttcgtattgcaacaggccgctttgctcctccatgcgggattcgtcattgaccggcctcgactggaagcgcctgttgccatgcacgtcgccgggattcagcgcggtgacagcgacgttgcggttcacttctgctcgtcgcatatcgccaccgtgctacactccggccacgccacgtaccgcgagttagaaaccgtactcagcaccgaggacgtgttcaacctggtggaactggtcaacgtcgcggccatccgcgattggcatgccctacagtcgagcaacccatgacccacaccgacactcgagacttgacgatccgcgctactactggccgcgacgacggcaagtcgttcattatcgccgagcttttgccgtatgacatggccggtttcatgctgcgcctgatgtccgcgctgcaggtacctgacgtgtccgtgatcaccgactttgtcgatgcggccaagcaagccaagcaagacggcaaggcgatggacgggacgtcggtcgtagagaccgtcgtgcagctgatgatgggttgcgaccccaaggcagtgcacgcattgatcggcgatatcctggcgcacgtcagtatcgcccctgacccaaacaacccggtcgcagtgcgtcgcgcgactgcggtagacatccgcgagatggccacgctgggtcagatcatcggcgggttcttcacggccaacatggtcaagagcgcgtaagccgtggcgctatcgctcaacccggttgcggtgttcaacgcgacggcgttgttcgccaaagcgtttccgcggatcagcccgccacaggccatctacgcggttctaaacgccgataccgcgatcccgctgacgatcccttcgcagtggatcgaagtcgcgccgcgctacgaggcacaggtggccgactacccaatcgagcagggcggcttcgccgcgtacaacaaagtgcgccgccctcggacgatcgatgtcgtgctcggcaaagggggctcggatctcgcccgcttcgcatggctggccgcaatcgagcagcaagaggcgaataaccccctgcagctgtacaccttaatcaccccgcaaggggtctacgccgactacacgatcgtgcggatgtcgcaccaaacccggcaagaccgcggctcgaatattctgtacctggagatccaattctcgcaggtgttgcagatccagtcggcgcaggatgcggcctccaacccgctagacgccaagtccgggccggtcgcacagctcgggcgggtctactcgtctgtcgtctctacagccacaacagcgttggccaccgccaagcgctacatcggcggataacgtatggccagcactgtagtcgacgagctcgtcgtaagattgaccctcgatgcggagccttacgaggaagccgagaagaaagtagatacgcaagctagaaccaccgagcgcaaggtgcgcgaacgcaccgatgcgcagaccaagcgcgacaaagaccagctgcgacggctgcgcgataacggcgcgagcgtcaaggcgttcgcggcaaccgttctgaccgcggtcaccgtcatgggcggactcgccgttgctgcgggtggggcgctgaccaacctactcggcttcgagaccggtttgcgccgccaggccgtcggcacctcgttgtcgaaccgtgagatgcaggcgtggggggcgacggcccggcgcttgggcgccgatgcagacgccggcgccgaggcgatcgccgcgctcgcgcgcgagcaacagcagttcaacttgacgggcaacgcgccgaccatgcaggcgcttgcgcgcctcggcgtgcgcgtcggaaaagacgtcagcgtcggcgacatgctcggccaggcgcagcagatctaccgaagtgccgcgccggaacaacgccaacagatcgaaaacactctgtccgcgcagggcgcctctgccgatttgatcttgatgatcaagtcggagaaagacgcacgcgccgaatatgcgcgatcatttgcccaggccagcgacgaaaaccgcaaggcgctcgatgcccttgccgactccctggagtccatgaaggcacaggcggtcagcgtcgctacggtgctgctggacgtactgcaacccgcggtcgaatggggtgcggtcaagttgggcgagttcgcgcgcgacgtgtccacgttcgccggtgaagtgcgcgacgccgggggtggcgtcgatgccttcgtcgatgcgctgaccaagcgttcggacaacgtgtccgagttcgtgcgagggctggagcacgctgcgatgcggtttcgccagatcggcgacgtgttgagctacgtgctcgacaaggtatctacgtgggctacgtccaagtggctccagtttctgtccggaggtaacggacagaacgggaaggacgtcagcgcaatcgccaacatggcgcgcaccggggcccaggcggtcgccagttgggcgtcgaacacctgggcgggcgcggtgggtgcagcgcgcgaccctggacgcggcttgccgcgtaacatcgagaacgacactgccgacggcttgccgcgcaatgtcgagaacgatcgacttggggcaaagccctcggcgaacgcgcagcaattcatggaaacgctggtcaccaagcacggcttgacggtcgcccaggccgcggctgtgacgtccaattggcaaggcgaatcgtcactggatcccacggcttacaacccggccggtggcggcaccggcgcgcgggggttgggccagtggcggggcccgcgcaccgaagcgttcaaacgcatgtacggcgtggatcccaccaaagcctcggtggacgagcagatcaacttcatgctcaccgatccctatgagcgccagctatgggaccaagtcaagcgcagcggtggtgacgacgcctaccgactgggcggcgaatactcccgccgctacgaggcgcacggcaacgttgcagaggacgcccggcgcgcacgaaatgcacaagtacttgccgatagctacggcgggtcggcgcaacgcagcggaaccggacagacgacttcggccgcgactgttttcaacattcagaacgtcgaggtcaaggcgaacaccccgcaggacttcgtcggtggtattcagcgcgtgaccggcacgcaaaaccatgttggggtgatgcgttgaacccgttcaaagaacgcaaggtgcaggtcatcgtacgtgtgcagcgccccgacgccgagggcactgcgcaagacctggaatacgcgttcgagcagcatcggatgtcgattactgtgtcgcaaggcggcaagcaattcggcaacgcgaaagtagtcatatacggtgtacgcttggacgccatgaaccagatcgcgcgcctgtggctcgaagcactgacgccgcaagcgaccgatatgctggaactcaatgtctgggatggccaggcgtacctaccgttcttctccggggtgatcacgtggtcgaccgtcaatgcctcacagcagccgcaggtcgctctggaaatcgaagcgaacgacgcgatggcggggatgatcgcaaccgcaagcccctacgcgcaagagggcccggtcgcgctgtgggatgcgcttaccgcgatcctggaacccgtcggattcgtggtggactacgccgacacggtgcccgatatctacatcacccgggcccgcgtgaccgggacgccaatcgaacaggcagggaagctgatggcctatttcccagatctgacgtggcacgtcaacctgcagcggttcattgtgcgcaacgcaaacgagccctacgacgaaaacgcgatccccgtcgccagggagacgggcatggtggggtatccggtatattcgaccagcgggttgtcgttctccacgttgttcgatgcacgcattcgccccggcgtgccgctagacgtacgtaccgagttcgatttcgtgaaccggacgaagtgggttgcatcggtgttgcagcacaacttgcagcccaatacgccaggtggggcgtggatgaccaacatcgcagccaattcgtttggcactaaggggaacaccgatggcgcgagcgcctaaaatcgacgccgcattgtcggcggtgatcgacccttcggacttcgtggcgcggttcgcgcgcgctggatccaacatgcgcacgcaggtgtttcgcgccgcaagtggagccgaggcgctcgagctcgcaaacgccagcatcgccgggttggattgggagttagtcgaattgctgacgctcgaagaagccaagaagcggcgggggctgtgatggccgccccaaagctgaacgcgccgttcgagacacaattcaacgccgagcgtgcacaagagttcatgatcctgcgcttgctgcgtcagatccacaccgccgatgtggttaaggtgctcgccgtctacccgaccgccggaactgtggggttcgtggacgtgcagccattggtgcaggaccgcgacaccagtaacgtggtgatcgcccaaagcccgatcttcaagttgccgtacctgcgcctgcagggaggcacctcggcgatcatcttggaccccgcagtgggtgatctgggactcgcagtcttcgcagagcgcgacatcaccaacgcggtcgccacccgggaagcgggcgccccgccgacagatcgcacttatgacacgggtgacggcctgtacttcggcgggttcctcaatgcggaccccacgcagtgggtcaagttcactcaggccggcggcatcgatatcttgtcgaccggcgatttgaacctgcaggccgccggagcaatgaccctgcaagccggcggtacgctgaccatgaccgcggcaaacgtggtgatcaatggcactacgacgttcaacaacccgataatcgccccgcaagccacgatcggtggaattcccttcaccacacatcgtcaccccaacggcagcccgaacaccggcgcgccgatcgcgtgaaacgctgataccatagaccgatgagcacaaacgtccccctgccaaagtttctgccaaccggcttgtcggtgccctcagagccggagattctggcgggggtgcaaaccgactggatccacgcgtttgccctgtcagggaaagcactcaacgccgagttgaccacgcctcaaggtcagctgcagcaaacccaagcgtttattttggcggccatcaatgcgcagctgctggagctggtcgctaacgtcgatccgatgaccagctctggcgcctggcaagatgcgctagggcgcatctacttcctgacgcgacagcctgcgacctacgctacggtgcaagcgaccgtacgcggcacagttggccaagtgttaccgctcggagcgcaggcacggtccagtgacggcagcttatgggcatcgacccaggccgtgacttttgggacgggcggggccgcgacggttgtgttccgggcagtgcaaatcggtgcaggccccgcggccggcgtcaatgacttgacgatctaccagcagcagacaggttgggagtcgatcagcaacgcgacggggagcgtgccggggttggatgtagagtcacgccaatcgttcgaggagcgccgtgcgtcatccgtcaacatcggcggcaacggcacggcgagcgcggtgcgcgctgccattgccaacgtgacgggggtgaccgatgtctttatctacaacaacggtagcgtcaacccgatcaggtatggcgcgacgaactatccgatcccggcacacagcttgggcattagcgtcgccgggggcgcagacgcggacatcgctgccgcaatccattccaaactcgactgcgggtgcggcttgccgaccgcccccggtttggggacattgatcacgcagctgatcgaggattcggaattctatgccgagccttacccgacgtatctgattcgcttcgtgcgccccgcacctgtgacgatctacgtcaccgtgaacgtcgccaatctgtcgacattgccgagtacctacgtgcagagcgtgcagaatgcggtcgccacggcgctgacgacggggtttgcgactccggacggctctatcacagtggaccgagcccgaatcggcggtcagatcgtcgccgcagaatacttcgccgcagtactggcgctacgcggcatcacccccgtgtcgattttcattggtacgagcccttctcccaccagcggcgctgcgttgaccatgggcatcgatcagttgcccgtctgcaccccgctagcggtcactgtcaacgccgtggcggtctgacgtgaccgactatctgcgcactgtcatgaagcagtacgccaacagcccgatcatttcgggactgttggcgagcttcgacgagtggtgcgacctgtcgcggttcactgccgatttcctctacaacctgtgggatatcagcaccgcgacgggctatggcttggatgtctgggggcgaatcttaggccaggatcggtacttgcagattcaacaagtaccgggtaacaacttcggtttcaatatcaacgatgcggtcggcacgcaatggcagccgttcaatcaagccccgttcttcaatggtgccgctggcgggactactgcgtttgcgctagaggacgtgtattaccgcaagctgctcttggtgaaggcggcgtcaaacatcgccagttgcgactgtccatcgatcaatgcgctcatgcgcgcgatgtttggcgatcgcggtaagtgctacgtcggctacgatccgaatcagccgatgatcatcggctaccacttcgagttcttcccgacggccgtagagcggtctatcattgaatcgggcttgtttccgcagccggcaggcacaaccgttcgtttcctgtacaaaaacctcacgtacgcgccgttcggttttgctggtgcgaacactggtgcgaatcctgaatacgtgacgggcttcaatcaaggcccgttttacaacaatccgtaaaggcgacttaccatgcaatctaccggccggccaaccaagttccttgtgccttttgccaacaacgactccgcgaaagtcgagctgccgctgacgacggccgacgccacgcgcgcttcgttgcgcacgggttttccaccactgaccggccagccgcccgaggccggcggcgtgcctccgcagttagaagacatgaacggcggactcaaccagatgagccggggcgcttggtggccgatgctcggtggccggtggccgtatgacgcgacctttgctgcggatgcggcgatcaacggttacccccagggcgcgttgctgccgtctgcagatggcctgggcaattgggtcagcaccgccgagaacaacactgccaaccctgacgccgacagcaccggctgggtgccaggcgcgttctacggcgcgaccgcgctgaccaatcagaccggcggcactgtcacactcgtgccggcgcaagccggcaaacgccgcatcacggtgagcggcacgctgacatccaacttggttatcgtcgttccgaattggatctactcgtgggatttcatcaacacgacgagcggcgcattttcaatggtagtgcgtaccgccaccggggctgcggcagtagtggaacaaaacggcgagcgtacgccggtattttgtgacggcaccaattgcacgttgggcagcccgaatatcgcccaagccacacgcccaacccaagcgatacggttcgatcaagctgtgggccgtctgctcaacgtacaacgctttacggcgagcggcacgtacacgcctacccccggtaccgctcgcatcgtggtagagattgtgggcggtggcggtgcgggtggcggtgcccagtccaccaacaccgcggcggcggtcggttgcggcggcggcggcggtgcgttcgtcaagttcatgctgactacggtacctagcagcgtctcggttgtgattggcgccggcggcgccagcgcaaacggccaaggtggggctgggggtacgtccaacttcggcgcgtacgcggcctgcagtggcggtggcggcgggcgtacgttcggtgcggactccagcattcctaattttggcggcgaaggtggctccggcggggatacagcgaccgtgggtgccggcgccgttgctctggttgcctcttcgggcgcgtctggaggtgccgcaacctcgctcggtgccggtgcttacctgacggccggtatgggaggtcctacgtatttcggcgggacggcaaaaacggcaaacacgactgcgggtgcgagtgcaaaagcaaacaccgggtgcgggggctccggcactacggcggcatccggcgcggtgacgatcattcaaggcggcgccggcgcggcaggtctatgcctggtgtacgagtacgcctgaccaaagagaaacccgccgaaaggcgggtttcttgtttactcggtgtcggcctgcgactccaaggcttcaatcgattgcaagtacgcttgcgcgtcagccaccgaggagaactgcgccaaggtggcgtccttgtggtcaaggatcgctgcaccagttgcggtggcggcgacgcgtcgcggacggatcggcggggtcaggatgataatcgtgctcacggcttcttctcgtttagctgctcgggtttgagcgagggggccagcgcgtatatcgcggtcaggtgatcttggagccgatcgactttgcgctccagcgcggcttggcgcactgcggcttcggtttgtcggccgccattggcgatgttccagccgaagaacagcgcggcgatgaccaccacgacccacatcgccgtcgacggcccctggccgttgatcgtcgcatgcccgccgttctgacttccaaactgccgggtcagcaggtcgtcgacgcgcgtgatgagctgttcgcgttgttcgttctggtgttgctcatccatgctgcatcgctccttcaagtcgatcgagtagtgagttgatgcgcaatacgtgcttgcccgtcggctcgtcacgtgccgcggcggtccgtaggtccagcagggcgctctgcagttcggcgcgaatcgtcgcgatttcgagctgccgggccgccacgcgctccaaagcgaccacgatgtagggcatgacgcgcatgcactcatcggcgcgcgaacgcatcggcatagcgatggcgcgacgacccctggcgatcagctcgctcaactcgctgttcgacggcgccggcttgccacggtatttgcgctccagccgttccatgctcaccacccggcgaatgaatcggcgccagggctggtaatgccccgcgaatacgaacatgccccagatgccccacatcagcgcggatccgcgccaggtgtagatgttgccaccaactgcggcggccatcagcatcatgaagctgataaacgtcacgatcaggtgcgacagcccttggaagaagtcgatcgcgccgggccaggtcagtgcctcgcgcagcgtcggggatcgcacagcgttgagaccgaatagcgcggtcagccagatgccagcgagcgcaggaatggcgaccagcgaccacacgtgcggcgtgaccgcggcggtgtaagtgtgcagcacgttcagttcactcagcatgcgatgctcccttgttggtggcgcgcaagcgcgcaagcgcgatttcgatcaccaccggggcccagtactgctgcgtgagtgcgagccccatgcccatgacggcctggtagcccgctccgttccatacgtaccctgtccactcgggaactcctaccacggcgacgagcgtcatgataaacgatacagcaaaagcaccaagcagattacctttatgttccacgcgcttgttccacacaccgacaaacgcgccgaaggcaatggccatcagcacgttgaatggcacgcccaaccccacgtccagatgcacccagggggcattcggcgctgcagctgttgtcgcgctggctgcgatgacaagcgcagcaagtgcgttggttgcggccacgaagccccctacgaaaatgaacggtcagagaataccaaacaactgcttggctttggacaacttcgtccggcgatcttctagaccccgaaggccgccattgatggcgcgggtaacgccttcgaggtcgtcggcctgggcgcgcgtccggcataccggcctgcgcaccgtccaataccaaaacgcagcctcgaccgcgtccgggagctccgccaatagctcgggattctcgacgcaccgatcgtcgttgtacttccacgccgaataggccgcatagttgctgcgacccgtgcattggatcagtccgcgacccttgaagcgcgtgccgtcgcctttctgcgtattgccgaggtcggcgcggccctcgtaggccgcgccggatgcgtattcgaccgcggtggcgaacccgtccgattcgtgcgcaagttgggcaatcagatgcgccttctccagcggggatgcgatgccgtgccagatgcaaccatcctcgatcggcttggcgtacttgccagcacccagtttctccgctacggtttcagtgctcatagtcatgcagtcctcagcggccgcgcaggcggctccagaatgcggcgatcatactccggaagcgctgccagcgcgacggacgctttagccgctccgtcacaccaccctcggtagcgaataaccgctgcaacgctccgtgcggcagccccgaggtgccgtgttttgtcacgtacttgtagatggccgcgccggctaccgcatcgtagcgcgccagcgcgcgccgcgaccccagcgtgtcacgcgtctgcgcgacgtggaataggtacgacgtcgaggaggaccgggggtgtacagttgcaccgtcggccaccaggccttcggctaggtactgtttggcctgctgcagcgtgctcgcaagcttacgatcgtccatgtcagtactccacgtacttggggcgaagatgcgctggcagcgcgtcgaatgcgaagttctcggcataatgttcgagctcgccatagtacgatgccaccgcagatgcgccggcagcgctgccttcgcggtggagtgcatcgacgagctcgtcgacggtcgggttcaccagcaccttgccggtgtgggtcaagacggctttcgacagattgtcgcgcagctgttcggccttggagacgtattcgacgtggagttcggccagggaggtcatagtgggttcgatccttttggggtggagggtgcgcgctgctgcgctagcttcggacgcttctggaatggttgtgaaagtgcccaagtgcgtgtattgcccaccgatgctaccgacatagcgccgtccattaggcgcgactgtggcatatacgccagttagcatgacaactctgtgatcaccacgcgcacaaaccccgacccactacaaggccctcgtagaatgtgcagttcgtcaatttggctatcgtctcgccacacgcgttgtttcgtgagcaagtcgcacaacagtttttcgcggttggccaaatcgtaggcgcgattacgatacgaagcgggtccgtgcacatatagcgtaacggcgaggcgcccctcaagggtagtaacacgacccactggcaaagcgccggctgcagctttcgtccaagcgcgcgcggcggccgacagaatgatgcgtccgccaaagacgcgccatattctgttgagagacggaggtaggggtagcactatgtccatcgtggtctcctcgcgaaaccgcccggcgtagccgggcggtgatggtcaccaaggaatttggtcatcgtccaattcgattagcggtgagttggacctactcaccgggccgcgaaagggttcccggactgggccgccgtaccctgggcgaacggattggcgttcgccggcgcggctgcggctgcggctgcggctgcggcaggctgcgatgccggagctgcgggttgcgctgcgggcgtttggccggggcgtacgccaaacgcttcggccgaatcgttgccaccagcacgacgttcgccgccaccgaccgacatgagaccgagcagcccgagcgagatgccgcggcgattggtcttcttgtggaaccagctgaacgcatttgcgttcacacgcacgtgttgccccgagaaaaactcggtcttgatgcgtgtggtgttcagcggcgtggcggccagcgcttcgcccgaatccagatacagctccggagcgtattgcgacgacatgcgggcgatcagccagttgtccggaatgccgggcgtgggcttggccatcgaggagttcaacttgggcgccagttcgtggccggcgagctggcccgattcggaaaccgcagtcatggcgctgaccagatcgctttgcgcttccggcgggaatgcgacgacggcgtaatactccagcggggcatcgtccgccttgagcttgttcttttcgggagccgcgagtgcggaatacaacaggatggcggtgtggtctggaatgctcataggtatctcagttctcaggtctcaggttgataggaagcggcccagttcagaaccgcgatacaacggtattacgtatgtggtgagatgtcaagcagtttcgaagggtctgcggcggcgcatctctgcgcgcaccgctgccagaccttcggcagtcaattgggggcgacgccgcatccggtcaacatgactggcgtctacgaatgctacatcacgcccacgcagcggctgtcctgcgttgttcagaaactgcggcttagtgtgtttttgtagccaccaactgggcttaatttggaatttccgcccgcagacgctggttccggtcattacgagccaaactgtttcgcccggacttatgtccacacacaggaaaggccccgagcgaaactcaccggggttgatgcgtcgaacccgggaatctgcgaagagcacggcagtgtcgagataagccacgattccgggttggatttgatcgagggttaaagccatcagttgttctccgcctttccaaggtactttgcgaacgcgtcgcgcgcaccgctcaggttcttgcccccggccggcgagtggatgaggacgtcgggagcgcgtccaatcgccgcggtgatggcttcggtcgggatagcggtctcgcgcatcttgcctatgctgggcggcaccagcaggtcgtagcgctcgtggatgagcagttgttcgatgaccacctcgggatttacccacatctcggcgcccttgcgccgggtcgtcttgacgactgggtctcccgcttcggcgagcatcttgacgcgctcgcgcaggtcgtcttcgaattgcttgaacgcgctgcgtgcgccccacaggtgcatcacctcttcgggcgacaggtcgaccacggcccgcctgcccgactctacgtccaatgcggccgtgccgtactcggacgcggccgggcaccagcgggccgacgggcagtacttgcagtgttcgccaggtgccgggggcgtaccgcccgggctgctggccgcccgggccaccgcatgcacctcggcgtcgagcttggcgcgctctgtggccagccactcaggggtaagcggcgccagcacctggaacggctcgccgaagcgaatgcgcggctgatagacgaatgcgccagcgtgcgtcgggtcgatcttgtcggtgccgagccagtcggacgtcagcactgcgagtgccccggccacctgctcgttcggctcgtctaacgtaccgcagcctaccggtgacccgccgtacttgtagtcgcccacgaccaggcggcgcgcgacgccgttccagagcatcacgtccgccacggtgcgcaattcgaccccgtggatgtgcgcggtgaaccggaattccggtacggcggacgacgcggtcgcacaatccgaaaacaacgactgcgcgtgcgcgacgtactggtcggcgtgtgcgtcgacttgcgccacccagcgcgtgacgccctccgccgagtaatcgaagccttcgagtccggccggcggctgcaccggcactgtcgagcgttgcgtcgacggggcgaatgcgtccaatacgcgcgcctcggccactttgtgcgcctcggtgccctcctgcgcggcggggccagactgcgtgcggatccgaggcagcacggctgacagcgcgcacttggaccaacggaaacggttggacatggtgaggatgggccgtgacgggtccggcacgaccagtcgtgcgccctcgggtaggtcggacggtgcgggaaagtcgaaggtcatgtggtttcctgggttgtaaggtgcagtcgccaccctacatatccacagggcagatgtcaacccaaagtcaactattcacgcaatagtgaaccaaacgtactagatgccagaggataaagctcttaattctctatatttaatgccaatgaaaaaaaggaaatttaagtcgatataattcttttgatttcacgttttagatatagagaggtttgttggtactttgcgtctgttcctctgcgtcgtgtacttttggttcatgtggtgcggggagacgcgtttcggtccagatgcgatacactccgcacatgtccgaccccacgccccatacagaactcgctccgatcaaggcgtcgttgatcgcggacttggtcggcttgctgaatctcaacttggcccaagtggtcaaggcgtctgcggtcgggtgtccgacatgcaagggcctgggcacggtcggtgacagcgaggtcggtcaggacgtgacgtgcccttcgtgcggtggcgttggtgcgatcgaggcgttcgtgctggacatggacgccatcaaaacacccgaggtgggccgccacatcgagcagtgggagtacaagcagggccagttcgttccgaagtttcggcctaagtcggcggctttcgcccagctgaccaagatcctgggcttcgacaaagcagtgctcgaggtggccggcgccgtggccttcgccgacgcgctgtcagacgagcagcgcgcgcagatcgtggatcaagtgcgtgaactggctcaggccggcgccctgtgaacgcgcaactcgtcccagatcccgtgctggccttgatcctcgcagcgcgcaccaatttcgcggcgttcgtctcggcggtgcatcgaccacgctttgtccacagtcatttttcgttgacggtatgcaaatccctggatgcattcgtggaggacgtaatcgccggcaagcgtcccattctggacctcacggccccacctcaatttggcaaaagttcgcttatttcgcggtgtctgccggggtatttgatcgggcgactaggccccgcgctcgggcaatgtcgcgtggcgctgtcgtcgtatgcgctgtcgcgcgccaaggcaaacctacgcgacgcgcgcagcgtgatggccgagcccatctaccgcgaaatatttccacacgccacgctgataggctacaaggtcggtcaacacaccgccgactacttcgaccacccgttcggattcgtcaaggcgcaaggcgttggcggcagtctcacggggttctctatcgacgtcgggcttaacgatgacttaacgtccgatgcccaggacgcacttagccagaccgtccaagatgggcaccttgactggtacctgacggtcttcggtacccggctccagcagcgtagcggacaggtaaacatgggtacgccgtggtctgccaacgacatcatggcgcggatcaacaagctgcacgagggaaagccgaactatcgccgcctgagcttccccgccatcaacgctcctgacgaggtgggcttcgacccggatttgcccgaaggctcgctggtaccggcgctgcacagtgaagagaagctgcgcgagattaaagcggccatgtctgaggcctggtgggcggccatgtaccagcagcgcccgctttccgaattgggcgccattttcggcaagggcggcgtgcgctactaccgcaaaaccgacctaccgacgcaattcgtccagaccatcatgaccgtggacgccacgttcaaggacgacccgaagcggagcgacttcgtgggtcttggtgtgtggggaaagacggcagacgaccgcgtatggttacttgcacatcgacgtgaaaaattgtcgttcacgcgcacggccgaggcgatcgtcgcgcttaagagcgcctacccgcagtgttcgcgcatattcattgaagccgcagccaacggtcacgcactggtggatgtactttcaaagcacgttgtgggcattgtgggtgtgccagcgcttggtagtaaagaggctcgctggcatgcggttgcgggcatttggcaatccggtcaagttctcctcccacaccccgaagaagtcccgtctattgtgcctgtcgtcgcagaaattgttgcagctcccgacgtgcgtaacgacgacatggtcgactgcatggccatggcgctttatcagctttgcatgcgcaacccgatcagcagcttgatcaatagtgacatcttgcggatggctggggcgcggtagttgccgcgcgcgcgccgcttacttggtcgcactttcgtgtaacatcgcgtcaaccgccccggagcccgctagatgacccgccgctcgactccccagcccgcaccgcaaccgcggcggctcgccatatcgcccgtcgacctggcgcgcgccgcggcgggcgacccggcacgtgcgacgcagacctcgctatctctggcaaccgcagaaccggtcgacaccgagcgctacagcgcgcgcgagcagcaagcggccaaggccgtacacgcgatggactacggcttcagccgcggcaatgcgaccgacgcgctgtcgttcgtctctgcgacgggctggccgggcttccagaccttgtcgctgctggctcagctgccggaataccgcaccatgcacgagacgctcgccgacgaggtcgtgcggacgtggggcaaagtggtcagcacgtccaaggacgccgctgcggcagacaaaatcacgcagatcacacagaagctcgagcagctgaacgtccgatcgcttatccgtaccgcagtaatccacgaccaggcatacggcggcgcacacgtgttcccgcatctgcgctccggtagcgtggacgttcctgccgactctccgctactgctcacccctgcgttcgtgacaaaggggtgcttgcaggcgttctcgtgcgtggagccgatgtggctcactcccaacgcctacaacgcgaccgacccgacgaagccgaatttttacaagccgtccagctggtacatgctgtcgacgatcgtgcacaccacccggctattcaccatgatcagccgaccggtcggcgacatgctcaaggccgcgtattcgttccgcggcgtgtcggtctcacagctggcgatgccctacgtcgacaactggttgcgcactcgccagtcggtcagcgatacggtcaagcagttcagcatcacgtacctgaaaatggacatggcgcagctgttggctccgggcggcgcccagtcgttgcaggaccgcttgaccctgttcaacctcaaccgcgacaaccgcaacgtcggtgcggtcgacatgacgaccgaggacttcgcgcagatcaacaccccgctatcgggtctggatgcgctgcaggcgcagtcgcaagagcagatggccgccgtatcgcacataccgctcgtcaagctgaccggcatcacgccggcgggcctgaacgccaatagcgacggcgagataagggtgtggtacgacttcgtcgcgggctaccaggtgcacaacacaggcccgctcatggagtggattctggatatcgtgcagctctccgagttcggcgagatcgatcccggcttgtcatgggactggaacccgttgtacgagctgaccgacttggagctggccgacgttcgcgagaagaatgcacgcaccgatcagacctacctcgaggcgcagatcgtcagtggcgacatggtcgctcagcgcttggcacaagacccgaattccgggtacgccggcatactggccgaccgcgacgcgctggacgaagtgcacgacttggctgaatcaatcctcgctgaagcgacgaccccacaaccgcaggccccaatcgatgagcccgatgctgaccaacccgacgcgcaagcagaagcaactggcggtgatcgggccgtcgagcgcagctgaacagcagtaccgcaaggcgttgcagcgcgccgtcaaggcgatggccaaaagcgtcgagtattgggcgcttgccaaataccgcgcagcgttggttgccaatcaggacgccgagaacatcccggatcccgaggccgcccaggacgccacgtccaaaacgccattcgacgtgcagcgcgcgctgttcaaagaactggaagccctgcgcactcgctgggagacgtacttcaaggatgtcgccaagcacttggcggtcgacgtggtcaacgcggcgtaccaagcaaacaagacggcgtggcaaggtcgcgtccgcaaagagggattcgacatcccgctgcaactgtcggccgcacagcgcaccattctggatgtcaaggtcaacgacaacgtcgcgctgatccggtcgatcccggagcaatacttcaccaagatacaaggcgacgtgtctcgggggttcctcgccggtcgggatctggaagcgatcgctagtgagctgcgcgacaccggaaaaaccacggtcaagcgcgcggccctcatcgcgcgcgaccagtcgaacaagctcaccgcgcaaatgaacagcgcgcgccagcgcgagctgggcgtgcgttacgcgtactggaagcacagcacggtcgacaaggatccacgccccgggcatatccgcgccagcaaagagctctggatattcgacacgcaggtaggcatcgatttcggggatcagttcggcttcgtgctgccatcgatggcgatcaactgccggtgcgggtcgcgcagcatcatcccggcgatcgacgaagacctcggcccggacgacttgctagccgttccgggcttccctggggcgtttactcggaagccgaagacgcgttagcgccggctcgcgcgagaagcaatagcacttcgacacaacctttgcgccagcgccgtacgccggcatccgcgcacacgtgcagcgtttcttcgtcgtcgtgcgttgcataccacttgtaagcaagttcgcttgggctcacgactgcacctcaccccgggctttggctagcacctcgagcgccattacggcgtcagacggctcgagcggcctacgcagcgtggcaaggaattcgagtgcgtcgtacaactcgggcgccgtgaccattacctgcgcattggcgcggcactgagcctccaagatgccttccccgcccagatgttccatggattggccgtccgcaatcgtgtgcccgtcaggagcaacgatgtagaacacggtgtgcacgccgtcggtgcagccatccctgaacttcacagtccacgggccgggagtccactgtggcgcaccgccggctttcgcttctgcttggtcgttcatgttgttagttcctgcggttgtggtgggagtcactttagcgtgaccttttgtgcttgtcaacaacaacgcttgcacgtttatgccacacagctatcatcgcgcgcatgcctgttgcaaccgctagttacgcgttcgataagaagtcggcccggtcgttcgatgccgacgggcgtatgcgcgtgcgcgactgtgtgctgtccgacgcggatatcaacccgtactacggccgtgagatccccgggtggaaagaactcggactcaagccggacaccgtgtacgagatgtatcgtgatccggacgcgctcgcgctcgccgccgactcgttcaacggcttgccgttgatgatccggcatatcgcccagacggccgacgagccgcgcaaagagcacaccgccggcagcgtctacaacgtccggttcgagccgccgcacttgcgcggcgatctgatgatcgcggacggcaaggcgatcgagttcgtccagtccggcatgctggccgatctgtcgtgttcctaccgctacaaacccgaaatgacacccggcgaagtcaacggccgtcgttacgacgggcgaatgatggcaatcgacggcaatcatgtggcgctcgtcgaagacgggcgcgcaaccggtgcgcacgtcgctgatagcgcgctctcttcccaaactggagcaccaaacgtggatccgatcgaaaacactcccgcaccggcggccggcaatgccgagttggcgcaagccctcgtgctgctgaccgaacagctcgaagcgctgaaagccgacgtcgctgcaatgaagggcgccccgtccgacgcggataaacccgtcgaaggcgtgccggccagcgtcaacaccgcgcacgacgaagacccggacaacgacaaagataaggatgacaagccagtcgcgatggacgccgcttccgtgcaggccgttgtcgacgctgccgtcacgtcggagcgcacgcgcgccaaggcggtcgagcaggccaagcgcgattgccgtccggacctgggcgacatgatcgccatggacaacgccaacgacatctatcgcgaggcactcaagcagcgcggcgtagacgtgtcggcgattcccgcaggcgccgaaatggcgacctaccaggcgatccagtcggtcacgcgtggctcgcgcctggatgtcaccgtgtcgcgtgccaacgacagcgcttctggcgcgcccgccttcgacacttcgcgtattcgcaatctcggtcgttaagaccaatcctcgggagttactgaaatgccctttcaatctactgttgctgtcaacccggcgattggcgtacctggcgactttgcctcggtcaatccccggcagttcgtggtgtccggtacgctgaatcagcgcatggtcagcgccccggcctcgccgggccccgcgttggccggcaagttcggtttgctgtcggcgaccggcaccgtgtcgagcacccccggctatgcggccgcatcggcgactggcgccgcaacgcgcatcggcttcgtgcatcgctacatgggcgcggcgctgatcaccacctggctcggtgaaacttccatgaccatccagcctggccaagcggtcgagctgttcgcgatcggcgatttcttcgccacggcagacgcgatcaccggtactccggtgcgtggcgctgcggtcatctgggatccggctgccggcaccatcaacatcggcgccgcagtgtcgagttccacgatcgacaccggcttcaagttgctgagcgagacggccgtcgcaggtcagaccgtcatgatcggcaagaacggcgcgtaagcggccaccatcgacaacctcatacaggaacagtgaccgtgaacgaacgtcaaaccatcaatgacttggcccgcgtcggcatcgtattgcccgatacggtcaaacaggtctccaaggaagcatccgcgtacgccaacgacgcgatcagtctggcccctacgctggtcaccggcgcgagcgccggtatcccggcgtggatgtcgatgtacgtcgaccgccgcgtgatcgacattcagctcgccccgatggccgcagagaagatcctgccggtcgtcaagaaaggcgactggaccacgcagtacgccgtgttcatcaccgccgagccggtcggtcaggtcgcgacctacagcgactggtccgccaacggcatgtcgaacgcgaacgtgaacttcccgtcgcgccagaactatatctaccagacctggaccgagtggggcgatcgtcagctcgccatcatgggcgaggcgggcatcgactgggcagcacgtcaagagatcgcctcctcgaccgtgatggccaagttccagaacagctcgttcctgctgggcgtggcgggcatcccgaactacggcctgatgaacgacccgacgctgaccgcgccggtcgctgcgaccgtcaactgggcgaccgccgagccggaagccatcgcgaacgacgtggtcgcgatggtgggccgtctgatcgcgcagtcggcgggtctgatcaccggtcaggaacgtctcgtcatggcgctcgcgccgtcggccctgaacgacatcaaccgcacgaacagcttcggcctgtcggccggtgccaagatcaagcagacctacccgctgatcgagtacgtggccgtgccggaatacgacagtgccggcggtcgtctggttcagctgtgggcaccggaagtcaacggccagccgtctggcgaagtggcgtacagcgagaagtaccgctcgcatgccatcgagcgctactcgacctaccagcgccagaagcacagcgccggcacctacggctcggtgatctacttgccgttcgccgtcacacaattgttgggcgcgtagcccagtaacaccgcaggaacaaaccccgcctaggcgggg

SEQ ID NO: 33 - DNA, 44377 bp, unidentified
  misc_feature 1..44377: note = the genomic sequence of a bacteriophage
  source 1..44377: mol_type = unassigned DNA
ggcccgggcgcactcgtgacacaccggctctacccagaacttagcggcgctcatcgcgcacccgccattccgtaagcgccgcacagtcggcccatcgtgtagtccgcattcgtccccgcgctagcgggcaaccagtcggcctcgacgtccaccgcttcgccgaaccgttctacctgcaccagcaggaagcgccaattctggcaatcgaacacgtaccggccgggcgcccactcacccaacgcattctggtgccgggtccaggcgaggatctgactgtcggcctggcgaatcgtcgaggcttgcacctgcacgccttggccgatcgcatgccaacccaacgggctgacggtctgtgcgtttgcgcccgaaccgagcaacagcgcggccagtgccgcgtaccaacgggacttgagtttcatcaggacaccatgtcgaggatgcgggcgacggtgcgcagagcgatcgtcacgaggattgtaatcgttaggccggtcgccagcatcgcaccgaccagtcggcccgggtgcgggtggcgccgacgggcctgcgggccgcgtggtgcgcggacgccgtacggattggggatcgaggtgttcatggcttatccttgatttcgattagggtgtctagccaattaggtgcacacagtgaagccctaaacggcgaccacgctttgcctcgcacgctcagccagatactggaaccagacacaggtcgcgactcgaatagataccagcgaccatctgcgtcttgtgcagcccactgcgcccaatccggcacatcgacgggcttaccatcgagaaccagaatcccgggcgccacctccacacacgctacgcactcccccgccaacgcagcatatgctgctaggtcgacgtagtcgtcgagcttgccggccgacgtggcgaacgcccgggcttgtttcagtacggtcatgaacagccagccgtcgcgctcggttagggcatacccagacagcgcgttgaacgcggcgacggtgcgcgccatcgagcgttcgccgcccggctggtcgcgctctgcggcgcggtcgtcgatggtctgcgcggactggcgcaggatgtcggaagcggtaggcatggctcaagcctccagcttcgacaggctggaaaacaacgcagctcgttcttcgatccacgccgccgcctccgccgccgcccgcgccgactgcgccgccgccgactgtgccgaccgcgcagccgaccacgcctccgccgtcaccgattccgccgccgattccgccgccgactccgtcgtcgactccgccgccgactgtgccgactccgccgccgaccaggccgaccgtgccgccgaccaggccgaccacgcagccgaccaggccgactccgccgccgagcgcgccgagcgcgccgccgagcgcgccgactgcgccgccgactccgtcgccgaccacgctgccgactccgccgccgactgcgccgactgcgccatcgccgactgcgccgaccgcgccaccgaccaggccgaccgtgccgccgactccgccgccgaccacgccgactgtgctgccgactgtgctgccgactgcgccgactccgccgccgactcgacgccatccacacctgcagcgccttcgtggaatcggcggccaacctcgagggcggagacgacctgtgcaattgcgtgagtaacttggtcgggatgatcggccaacaaggcggcgcgctgcgtcaccagcatcctgtcgattcgcgcaatggcgatgagatgcggcagcggggccaggtccacgccgaccgggatgcgctttgcaagctcgacgtggaagctgccacgctcagctgccggcaagccctcgaacatcgagtcctgcaggcggatcaaccattccggcagggcgcgcgcatccgccacggttgcgtgaaagctagtgctatccgggtcgatctcgtgagcgaagcagccgaccgagcagccgcggaattggccgtcgtgcatctcgccaaacgtgccagagaccagcatgtcctgtgcttcgtgccgctcagcctgagcaacgtgtagtgccttgagtgccggatcgttattgaaagaaagctgtgccatgtggctgtctcgtcgtgggtgtgggcttagtatgtcacttacggtttacttctgcaagcgcgttttcgatgtcgcgcatcacagtatcgatcggcaccgtacggtcgtagatgccgatcggcgtcccgcccgggtgcccgtacagggcgtgcgcggtagcgccacgttgtgagacgcaaatcacgtaccggccgtacttggagcgcatatgggagattctggcgcgcattaggaccgccagtgccggtcggcgtttcgcgactgcaccccgaccatcgcggcacgcgtcgcggggtgacgactgaaagcctcgatcagcacatcgcgggtgtacgacttctcggatgaccaggctttgccgacgaccggcaccacgccagtcggacgcttccagatcctgacgaccaggctgcagtccttgcctagcctggacagcgtgccacggtcgagcgtgacgccggggagccactgggccgcctgttcgacggtccacatcggttcttgcgtgaatgcattcattgtgggcaaatcctctgtgggttacagggtgaacgcgcagccgaccagtgccagcagcgacagggcgacgctagcggttgcgccgcaggtcatcgcagtgatcgtgcggtcggcattcggcgccacgaaggacagcacgaagccgaggacgataaggaccagggcgatagcgccgaaagctacggggatcaagatcggatcgaacatgtgggtgtctcgacggtgtgggactagaatcccacatgctatcccccatgtcaaccaaaagttacatcgattttaactatcgaatagcgccaaacgggttgatcggtatgacgttgtcttcggcaggctcccaaccctccggggcgcggtagacgcgcaagccacgtgcgtcctgggtcgcaacccacccgcgcgtcttgagccacgcggcggcctggcgcgcgctgaacttacggcccgagggcgttgcgtccagcgcggtgcgaatctccagcgagccgacacggcccgtctttgcgccgaatttactcaggatcggcggtagcaggtcgtcgagatccgaatcgaccgtaccgcggcccgagcgcatgtcctcggcgttgtacgctttgaccagctcgggcaccgaccgtaccagcttggtgtactcggcccaggaatcgcaaaaacgggctttggcttcggccaggatctgcggcaactcgacggcccaatccagcgggggtgctgtctcgcagagcacgggcatgaagcggctgttgccggtctcgtcgcgattgagctcgtgtttgtttgcggtgccgaacagcacgtaccgccgtgggtgcgacacctcgcggcgatcgtacggtgcgcggtagacgtcctgcgtgtcggttgtccagcgcttgacgtcctcgacctcgcgcttgcccaggcccgacatttcgcacaactcggcgaccggcgaccgcgcggcggccatcgccattttgcgatcctcggtgaacgcaatttccgagggtagcggcacgcccatcgcctcggcgatctgcacgccgaacaggcccttacccttgcgttgctcgccaatcagtaccggcaccaccgggcacggggcgccggggcgcagctggcgcatcaccaagccggcgaagaagacctgaccggccccagtcaatgccgggctgcctggcgtgccgtacaagtccgtgaaaatggtatccagacgggcccgcttgtcccagacgggcaacgacaagacggcgtctttccacgggtcgaccggtcggccgcgtgccacagtctccagcgcggtttgcaacgtgccgactgaaaccgtggaggcgccaagacgggtgacagcttcgagccacatgccgatcgacggcaagtcctcgtcgttgagcttgtcggcgcagacgtcgtaggtgagcatgagaccggcttcacgcgcgagcagcttggtggcgaacaccagattctgcacgctgctgtggcgtttgtcggcgcggtcgggccattcctcgatcgtgccgcacagccgttcggccgcaagctcgagcgggtgtgatagctccgacgcatccgactccccgaaggcaaagaaatcccccagcttgtgcgaccacacgcccttgacaccgcgcagcgtgaccacctcggcggcgcgcaaatcgccacccgacaaatcgtgtcgggtggagtcgaacggatcggcgcaccgccggccagtggcttggtcgaaatgacgcattgcatcgccgaccgtcatgcgcagcggttcgggcgtgtgttcgaacaccagcggccaggacggcgggagcaccttgtcgcccagcgcgcgcagcgcaagagcgcccatacggtcgccgtcgtcgcgaccggccgctaacgcgttggctttgtggtagtccagtgcaacgcgcttggcctcgacgcgcatgttgttcttggcctgacgcaccgcagtttcgaaacgacgaatcgcgatatcacgcaccgccggcatctcttggacgtcgagaaacccttcattggtgcggtatttcgcgctcttggaggtatccgacgaacgcgcgacccacgcatgcgcgtcgggcacgttgcgcgcgatgccgtcgtttagcacgggtgccgcttcgaacatcagccgggacggttgatagaccagtgcgtcggaaagctggcgcaccagcaacgcgccggagcgcgacacgatgatgcggccgcggccggcggcccattgatcgatctgcagccgttgcgcaagcgcggggatgtcggtgccacgggtgacgccaaggtagatgtgaacgccgcgcagtccgcgatcggcgacgtacgaggatgccgaggggcgaccgacgcgcaatgcctggcgcagccacggagaagccgactccagcgcgtccatcacttcctcgactgagctgtagaccgaggtctcggtgtcgacatcgatcaggaacaaccccggggcatccgagtagcggaacgcttcattggtccgagccaccgcgtgtgggttgaactcggagccgcgtcgagtcgtgagcggcgtgttgccgacgatcggcaggcctgccgtgatcgcgtgatgcggttcgaggttgtccagaacggtgcgcaagtccagcagtgacgcgacttcgcgcacttcggcgaagccttcggtcatgtgcgcgattgccgagctcgtgaccttgccgtctttgagctcgaacgacttggccaactcacaagacgtcgaggtgatcagggtgaagcgaatcgggggtgttggggcgtggtcaggcatgtggtcgctctgtcatgtgggtgacgggtgtgtgcaggtcagtctgcgcttggttgtggggggctgtccagctctgcgccgactagccacataaaacgggcagtgagcccgagctgacgtcgcgggtaaccagcggtacggagtgaacgtccggtcgcgatggcctcgcctttggctggtgactgtttgcggatcagcaaaaacagctcctgcaccgagaaccagcctgcgttggtagaaccgaaggcagccacctcggccagcgtgagggggccgccggctttgttgggcttctcgaagttgacggtcaacacgcgccacccggcctccgcgttgacttcctgggcgtacatctgggctttggcgacgatatccatgtggtttcctgggttgtgaggtgcagtcgctaccttacatatccacagggcagttgtcaacccaaggtcaactattcacgcaatagtgaaccaaacgtactagatgccagaggataaagctcttaattctctatatttaatgccaatgaaaaaaaggaaatttaagtcgatataattcttttgatttcacgttttagatatagagaggtttgttggtactttgcgtctgttcctctgcgtcgtgtacttttggttcatgtggtgcgcgagcgtcctctagcattgacggggtccgcagcggcaagtaacctcgcgcgcatggcaaacgacacgctcgcattggacccggcagtttgggatctgacactggacgcctacggcaacgtcgcgacggtcggagacgacaccgcgcaagacgtgcaaaccgggccgggcctgcgcctggctcaagacgtagcgacccgtacgcgggcctggcgcggcgaggtctacttcgacaccgcccagggcatcgactacgacgcgtacctgggtacagctccgctggtcggccagctgcaatctgactttcaaaccgaggcactcaaggtgcccgggtgcgcgacggccttggcgaacttcgacctggcccgtacgccgcgagtgctctccggcacgttgctgctgtcggatcaggccggtaacggtgcgcaggtcgcggtatgagcttgcagcagattcccgtgcagcaaagcgcaaaccaagcgttctccgtcgtgctggatgaccgcaacgtacagatgacgctgcgcactacggaaactggactctacatctcggtgctttccgacggcatcccagtggtgactgggcgccgctgtctggaccgcaccaacctgattccgtccggcgcctatctgggcataccgaacgcgttgttcttcgccgatctgcaaggtgaagcggaccccgtgttcgcggagtttggcacgcgcttcgttctgctttacggcgacccggcggcaaatggggcgacagtcgtgccgacgcgaccctcaggtgcgacggcgcgcccaattaacgaaatggcactgctctatgatggcgcagcgtcgtacaatggcgagtactacttcggagcaacgtagtgtcaacgatcccagaattcccgggcagcgttccggtgccgatgatccaaccggatgatcgggtacttggcggacctgcgggggctgcgaacaagcaggcgattgcgctgatggaaaatgccgggatcctgtacgacacagtgaccgccgcgacccaactcgcaacgactgctgcatcggcggcccagaccgcagcgactaccgcatcgacggcggcaagtactgcgaccgcggcggcaagtactgccagcgccgcacagactgcagcccaatcggctgcacaaactgcgaccgcggcccagaccgcagcgggcgccgcggacagcaaagcgaccgccgcacagacgcaagcgggtgcggcagcgacgacggccggctcggcagatagcaaagcgacggccgcgctcaccgcggcgcagtccaaatcgacgcgctacgacctgggcactgtcaacgtctcctattccgcggccttggcgctcggcgcgggcgctcgtagtgtcgttgtgccctgcccgggcgccatggtcggcgacgcggtgttcgttgcggcaactggtgcgattccggacggctacgcggtcggcgccgcccagtgcctcgtcgccgatacgatccgtgtgtcgattgtgcaccccgccttggtcctcggggcgaatttcacgatcccagtgaaggcgttcgcactgcgctaggcgcttgacaaccgcgcacgctgcgtgcaacctgtcgttgccgcaaatgtgggcggtccgtgggtgtggttgggccggggcgtgtgggcgccccggcccattttatttggagccatgccgtgctcaagcaactcacagtcaatctgaccggcgctgatgctgggcgcccgattaccctcatagagcgacctgcgctcgtcgcagaccgtctagcgcgcgctgcattggccgaagcaggcgcgcctctcgccgggggcgtcatcggcttggtgttcgagcacatgggcgcagtgcgccagctcggtgagcgatccaacgcactgctgcagccgttcgtagacgccgaccggcagccgttgggctgggagaacgtgttcgtattgcaacaggccgctttgctcctccatgcgggattcgtcattgaccggcctcgactggaagcgcctgttgccatgcacgtcgccgggattcagcgcggtgacagcgacgttgcggttcacttctgctcgtcgcatatcgccaccgtgctacactccggccacgccacgtaccgcgagttagaaaccgtactcagcaccgaggacgtgttcaacctggtggaactggtcaacgtcgcggccatccgcgattggcatgccctacagtcgagcaacccatgacccacaccgacactcgagacttgacgatccgcgctactactggccgcgacgacggcaagtcgttcattatcgccgagcttttgccgtatgacatggccggtttcatgctgcgcctgatgtccgcgctgcaggtacctgacgtgtccgtgatcaccgactttgtcgatgcggccaagcaagccaagcaagacggcaaggcgatggacgggacgtcggtcgtagagaccgtcgtgcagctgatgatgggttgcgaccccaaggcagtgcacgcattgatcggcgatatcctggcgcacgtcagtatcgcccctgacccaaacaacccggtcgcagtgcgtcgcgcgactgcggtagacatccgcgagatggccacgctgggtcagatcatcggcgggttcttcacggccaacatggtcaagagcgcgtaagccgtggcgctatcgctcaacccggttgcggtgttcaacgcgacggcgttgttcgccaaagcgtttccgcggatcagcccgccacaggccatctacgcggttctaaacgccgataccgcgatcccgctgacgatcccttcgcagtggatcgaagtcgcgccgcgctacgaggcacaggtggccgactacccaatcgagcagggcggcttcgccgcgtacaacaaagtgcgccgccctcggacgatcgatgtcgtgctcggcaaagggggctcggatctcgcccgcttcgcatggctggccgcaatcgagcagcaagaggcgaataaccccctgcagctgtacaccttaatcaccccgcaaggggtctacgccgactacacgatcgtgcggatgtcgcaccaaacccggcaagaccgcggctcgaatattctgtacctggagatccaattctcgcaggtgttgcagatccagtcggcgcaggatgcggcctccaacccgctagacgccaagtccgggccggtcgcacagctcgggcgggtctactcgtctgtcgtctctacagccacaacagcgttggccaccgccaagcgctacatcggcggataacgtatggccagcactgtagtcgacgagctcgtcgtaagattgaccctcgatgcggagccttacgaggaagccgagaagaaagtagatacgcaagctagaaccaccgagcgcaaggtgcgcgaacgcaccgatgcgcagaccaagcgcgacaaagaccagctgcgacggctgcgcgataacggcgcgagcgtcaaggcgttcgcggcaaccgttctgaccgcggtcaccgtcatgggcggactcgccgttgctgcgggtggggcgctgaccaacctactcggcttcgagaccggtttgcgccgccaggccgtcggcacctcgttgtcgaaccgtgagatgcaggcgtggggggcgacggcccggcgcttgggcgccgatgcagacgccggcgccgaggcgatcgccgcgctcgcgcgcgagcaacagcagttcaacttgacgggcaacgcgccgaccatgcaggcgcttgcgcgcctcggcgtgcgcgtcggaaaagacgtcagcgtcggcgacatgctcggccaggcgcagcagatctaccgaagtgccgcgccggaacaacgccaacagatcgaaaacactctgtccgcgcagggcgcctctgccgatttgatcttgatgatcaagtcggagaaagacgcacgcgccgaatatgcgcgatcatttgcccaggccagcgacgaaaaccgcaaggcgctcgatgcccttgccgactccctggagtccatgaaggcacaggcggtcagcgtcgctacggtgctgctggacgtactgcaacccgcggtcgaatggggtgcggtcaagttgggcgagttcgcgcgcgacgtgtccacgttcgccggtgaagtgcgcgacgccgggggtggcgtcgatgccttcgtcgatgcgctgaccaagcgttcggacaacgtgtccgagttcgtgcgagggctggagcacgctgcgatgcggtttcgccagatcggcgacgtgttgagctacgtgctcgacaaggtatctacgtgggctacgtccaagtggctccagtttctgtccggaggtaacggacagaacgggaaggacgtcagcgcaatcgccaacatggcgcgcaccggggcccaggcggtcgccagttgggcgtcgaacacctgggcgggcgcggtgggtgcagcgcgcgaccctggacgcggcttgccgcgtaacatcgagaacgacactgccgacggcttgccgcgcaatgtcgagaacgatcgacttggggcaaagccctcggcgaacgcgcagcaattcatggaaacgctggtcaccaagcacggcttgacggtcgcccaggccgcggctgtgacgtccaattggcaaggcgaatcgtcactggatcccacggcttacaacccggccggtggcggcaccggcgcgcgggggttgggccagtggcggggcccgcgcaccgaagcgttcaaacgcatgtacggcgtggatcccaccaaagcctcggtggacgagcagatcaacttcatgctcaccgatccctatgagcgccagctatgggaccaagtcaagcgcagcggtggtgacgacgcctaccgactgggcggcgaatactcccgccgctacgaggcgcacggcaacgttgcagaggacgcccggcgcgcacgaaatgcacaagtacttgccgatagctacggcgggtcggcgcaacgcagcggaaccggacagacgacttcggccgcgactgttttcaacattcagaacgtcgaggtcaaggcgaacaccccgcaggacttcgtcggtggtattcagcgcgtgaccggcacgcaaaaccatgttggggtgatgcgttgaacccgttcaaagaacgcaaggtgcaggtcatcgtacgtgtgcagcgccccgacgccgagggcactgcgcaagacctggaatacgcgttcgagcagcatcggatgtcgattactgtgtcgcaaggcggcaagcaattcggcaacgcgaaagtagtcatatacggtgtacgcttggacgccatgaaccagatcgcgcgcctgtggctcgaagcactgacgccgcaagcgaccgatatgctggaactcaatgtctgggatggccaggcgtacctaccgttcttctccggggtgatcacgtggtcgaccgtcaatgcctcacagcagccgcaggtcgctctggaaatcgaagcgaacgacgcgatggcggggatgatcgcaaccgcaagcccctacgcgcaagagggcccggtcgcgctgtgggatgcgcttaccgcgatcctggaacccgtcggattcgtggtggactacgccgacacggtgcccgatatctacatcacccgggcccgcgtgaccgggacgccaatcgaacaggcagggaagctgatggcctatttcccagatctgacgtggcacgtcaacctgcagcggttcattgtgcgcaacgcaaacgagccctacgacgaaaacgcgatccccgtcgccagggagacgggcatggtggggtatccggtatattcgaccagcgggttgtcgttctccacgttgttcgatgcacgcattcgccccggcgtgccgctagacgtacgtaccgagttcgatttcgtgaaccggacgaagtgggttgcatcggtgttgcagcacaacttgcagcccaatacgccaggtggggcgtggatgaccaacatcgcagccaattcgtttggcactaaggggaacaccgatggcgcgagcgcctaaaatcgacgccgcattgtcggcggtgatcgacccttcggacttcgtggcgcggttcgcgcgcgctggatccaacatgcgcacgcaggtgtttcgcgccgcaagtggagccgaggcgctcgagctcgcaaacgccagcatcgccgggttggattgggagttagtcgaattgctgacgctcgaagaagccaagaagcggcgggggctgtgatggccgccccaaagctgaacgcgccgttcgagacacaattcaacgccgagcgtgcacaagagttcatgatcctgcgcttgctgcgtcagatccacaccgccgatgtggttaaggtgctcgccgtctacccgaccgccggaactgtggggttcgtggacgtgcagccattggtgcaggaccgcgacaccagtaacgtggtgatcgcccaaagcccgatcttcaagttgccgtacctgcgcctgcagggaggcacctcggcgatcatcttggaccccgcagtgggtgatctgggactcgcagtcttcgcagagcgcgacatcaccaacgcggtcgccacccgggaagcgggcgccccgccgacagatcgcacttatgacacgggtgacggcctgtacttcggcgggttcctcaatgcggaccccacgcagtgggtcaagttcactcaggccggcggcatcgatatcttgtcgaccggcgatttgaacctgcaggccgccggagcaatgaccctgcaagccggcggtacgctgaccatgaccgcggcaaacgtggtgatcaatggcactacgacgttcaacaacccgataatcgccccgcaagccacgatcggtggaattcccttcaccacacatcgtcaccccaacggcagcccgaacaccggcgcgccgatcgcgtgaaacgctgataccatagaccgatgagcacaaacgtccccctgccaaagtttctgccaaccggcttgtcggtgccctcagagccggagattctggcgggggtgcaaaccgactggatccacgcgtttgccctgtcagggaaagcactcaacgccgagttgaccacgcctcaaggtcagctgcagcaaacccaagcgtttattttggcggccatcaatgcgcagctgctggagctggtcgctaacgtcgatccgatgaccagctctggcgcctggcaagatgcgctagggcgcatctacttcctgacgcgacagcctgcgacctacgctacggtgcaagcgaccgtacgcggcacagttggccaagtgttaccgctcggagcgcaggcacggtccagtgacggcagcttatgggcatcgacccaggccgtgacttttgggacgggcggggccgcgacggttgtgttccgggcagtgcaaatcggtgcaggccccgcggccggcgtcaatgacttgacgatctaccagcagcagacaggttgggagtcgatcagcaacgcgacggggagcgtgccggggttggatgtagagtcacgccaatcgttcgaggagcgccgtgcgtcatccgtcaacatcggcggcaacggcacggcgagcgcggtgcgcgctgccattgccaacgtgacgggggtgaccgatgtctttatctacaacaacggtagcgtcaacccgatcaggtatggcgcgacgaactatccgatcccggcacacagcttgggcattagcgtcgccgggggcgcagacgcggacatcgctgccgcaatccattccaaactcgactgcgggtgcggcttgccgaccgcccccggtttggggacattgatcacgcagctgatcgaggattcggaattctatgccgagccttacccgacgtatctgattcgcttcgtgcgccccgcacctgtgacgatctacgtcaccgtgaacgtcgccaatctgtcgacattgccgagtacctacgtgcagagcgtgcagaatgcggtcgccacggcgctgacgacggggtttgcgactccggacggctctatcacagtggaccgagcccgaatcggcggtcagatcgtcgccgcagaatacttcgccgcagtactggcgctacgcggcagcacccccgtgtcgattttcattggtacgagcccttctcccaccagcggcgctgcgttgaccatgggcatcgatcagttgcccgtctgcaccccgctagcggtcactgtcaacgccgtggcggtctgacgtgaccgactatctgcgcactgtcatgaagcagtacgccaacagcccgatcatttcgggactgttggcgagcttcgacgagtggtgcgacctgtcgcggttcactgccgatttcctctacaacctgtgggatatcagcaccgcgacgggctatggcttggatgtctgggggcgaatcttaggccaggatcggtacttgcagattcaacaagtaccgggtaacaacttcggtttcaatatcaacgatgcggtcggcacgcaatggcagccgttcaatcaagccccgttcttcaatggtgccgctggcgggactactgcgtttgcgctagaggacgtgtattaccgcaagctgctcttggtgaaggcggcgtcaaacatcgccagttgcgactgtccatcgatcaatgcgctcatgcgcgcgatgtttggcgatcgcggtaagtgctacgtcggctacgatccgaatcagccgatgatcatcggctaccacttcgagttcttcccgacggccgtagagcggtctatcattgaatcgggcttgtttccgcagccggcaggcacaaccgttcgtttcctgtacaaaaacctcacgtacgcgccgttcggttttgctggtgcgaacactggtgcgaatcctgaatacgtgacgggcttcaatcaaggcccgttttacaacaatccgtaaaggcgacttaccatgcaatctaccggccggccaaccaagttccttgtgccttttgccaacaacgactccgcgaaagtcgagctgccgctgacgacggccgacgccacgcgcgcttcgttgcgcacgggttttccaccactgaccggccagccgcccgaggccggcggcgtgcctccgcagttagaagacatgaacggcggactcaaccagatgagccggggcgcttggtggccgatgctcggtggccggtggccgtatgacgcgacctttgctgcggatgcggcgatcaacggttacccccagggcgcgttgctgccgtctgcagatggcctgggcaattgggtcagcaccgccgagaacaacactgccaaccctgacgccgacagcaccggctgggtgccaggcgcgttctacggcgcgaccgcgctgaccaatcagaccggcggcactgtcacactcgtgccggcgcaagccggcaaacgccgcatcacggtgagcggcacgctgacatccaacttggttatcgtcgttccgaattggatctactcgtgggatttcatcaacacgacgagcggcgcattttcaatggtagtgcgtaccgccaccggggctgcggcagtagtggaacaaaacggcgagcgtacgccggtattttgtgacggcaccaattgcacgttgggcagcccgaatatcgcccaagccacacgcccaacccaagcgatacggttcgatcaagctgtgggccgtctgctcaacgtacaacgctttacggcgagcggcacgtacacgcctacccccggtaccgctcgcatcgtggtagagattgtgggcggtggcggtgcgggtggcggtgcccagtccaccaacaccgcggcggcggtcggttgcggcggcggcggcggtgcgttcgtcaagttcatgctgactacggtacctagcagcgtctcggttgtgattggcgccggcggcgccagcgcaaacggccaaggtggggctgggggtacgtccaacttcggcgcgtacgcggcctgcagtggcggtggcggcgggcgtacgttcggtgcggactccagcattcctaattttggcggcgaaggtggctccggcggggatacagcgaccgtgggtgccggcgccgttgctctggttgcctcttcgggcgcgtctggaggtgccgcaacctcgctcggtgccggtgcttacctgacggccggtatgggaggtcctacgtatttcggcgggacggcaaaaacggcaaacacgactgcgggtgcgagtgcaaaagcaaacaccgggtgcgggggctccggcactacggcggcatccggcgcggtgacgatcattcaaggcggcgccggcgcggcaggtctatgcctggtgtacgagtacgcctgaccaaagagaaacccgccgaaaggcgggtttcttgtttactcggtgtcggcctgcgactccaaggcttcaatcgattgcaagtacgcttgcgcgtcagccaccgaggagaactgcgccaaggtggcgtccttgtggtcaaggatcgctgcaccagttgcggtggcggcgacgcgtcgcggacggatcggcggggtcaggatgataatcgtgctcacggcttcttctcgtttagctgctcgggtttgagcgagggggccagcgcgtatatcgcggtcaggtgatcttggagccgatcgactttgcgctccagcgcggcttggcgcactgcggcttcggtttgtcggccgccattggcgatgttccagccgaagaacagcgcggcgatgaccaccacgacccacatcgccgtcgacggcccctggccgttgatcgtcgcatgcccgccgttctgacttccaaactgccgggtcagcaggtcgtcgacgcgcgtgatgagctgttcgcgttgttcgttctggtgttgctcatccatgctgcatcgctccttcaagtcgatcgagtagtgagttgatgcgcaatacgtgcttgcccgtcggctcgtcacgtgccgcggcggtccgtaggtccagcagggcgctctgcagttcggcgcgaatcgtcgcgatttcgagctgccgggccgccacgcgctccaaagcgaccacgatgtagggcatgacgcgcatgcactcatcggcgcgcgaacgcatcggcatagcgatggcgcgacgacccctggcgatcagctcgctcaactcgctgttcgacggcgccggcttgccacggtatttgcgctccagccgttccatgctcaccacccggcgaatgaatcggcgccagggctggtaatgccccgcgaatacgaacatgccccagatgccccacatcagcgcggatccgcgccaggtgtagatgttgccaccaactgcggcggccatcagcatcatgaagctgataaacgtcacgatcaggtgcgacagcccttggaagaagtcgatcgcgccgggccaggtcagtgcctcgcgcagcgtcggggatcgcacagcgttgagaccgaatagcgcggtcagccagatgccagcgagcgcaggaatggcgaccagcgaccacacgtgcggcgtgaccgcggcggtgtaagtgtgcagcacgttcagttcactcagcatgcgatgctcccttgttggtggcgcgcaagcgcgcaagcgcgatttcgatcaccaccggggcccagtactgctgcgtgagtgcgagccccatgcccatgacggcctggtagcccgctccgttccatacgtaccctgtccactcgggaactcctaccacggcgacgagcgtcatgataaacgatacagcaaaagcaccaagcagattacctttatgttccacgcgcttgttccacacaccgacaaacgcgccgaaggcaatggccatcagcacgttgaatggcacgcccaaccccacgtccagatgcacccagggggcattcggcgctgcagctgttgtcgcgctggctgcgatgacaagcgcagcaagtgcgttggttgcggccacgaagccccctacgaaaatgaacggtcagagaataccaaacaactgcttggctttggacaacttcgtccggcgatcttctagaccccgaaggccgccattgatggcgcgggtaacgccttcgaggtcgtcggcctgggcgcgcgtccggcataccggcctgcgcaccgtccaataccaaaacgcagcctcgaccgcgtccgggagctccgccaatagctcgggattctcgacgcaccgatcgtcgttgtacttccacgccgaataggccgcatagttgctgcgacccgtgcattggatcagtccgcgacccttgaagcgcgtgccgtcgcctttctgcgtattgccgaggtcggcgcggccctcgtaggccgcgccggatgcgtattcgaccgcggtggcgaacccgtccgattcgtgcgcaagttgggcaatcagatgcgccttctccagcggggatgcgatgccgtgccagatgcaaccatcctcgatcggcttggcgtacttgccagcacccagtttctccgctacggtttcagtgctcatagtcatgcagtcctcagcggccgcgcaggcggctccagaatgcggcgatcatactccggaagcgctgccagcgcgacggacgctttagccgctccgtcacaccaccctcggtagcgaataaccgctgcaacgctccgtgcggcagccccgaggtgccgtgttttgtcacgtacttgtagatggccgcgccggctaccgcatcgtagcgcgccagcgcgcgccgcgaccccagcgtgtcacgcgtctgcgcgacgtggaataggtacgacgtcgaggaggaccgggggtgtacagttgcaccgtcggccaccaggccttcggctaggtactgtttggcctgctgcagcgtgctcgcaagcttacgatcgtccatgtcagtactccacgtacttggggcgaagatgcgctggcagcgcgtcgaatgcgaagttctcggcataatgttcgagctcgccatagtacgatgccaccgcagatgcgccggcagcgctgccttcgcggtggagtgcatcgacgagctcgtcgacggtcgggttcaccagcaccttgccggtgtgggtcaagacggctttcgacagattgtcgcgcagctgttcggccttggagacgtattcgacgtggagttcggccagggaggtcatagtgggttcgatccttttggggtggagggtgcgcgctgctgcgctagcttcggacgcttctggaatggttgtgaaagtgcccaagtgcgtgtattgcccaccgatgctaccgacatagcgccgtccattaggcgcgactgtggcatatacgccagttagcatgacaactctgtgatcaccacgcgcacaaaccccgacccactacaaggccctcgtagaatgtgcagttcgtcaatttggctatcgtctcgccacacgcgttgtttcgtgagcaagtcgcacaacagtttttcgcggttggccaaatcgtaggcgcgattacgatacgaagcgggtccgtgcacatatagcgtaacggcgaggcgcccctcaagggtagtaacacgacccactggcaaagcgccggctgcagctttcgtccaagcgcgcgcggcggccgacagaatgatgcgtccgccaaagacgcgccatattctgttgagagacggaggtaggggtagcactatgtccatcgtggtctcctcgcgaaaccgcccggcgtagccgggcggtgatggtcaccaaggaatttggtcatcgtccaattcgattagcggtgagttggacctactcaccgggccgcgaaagggttcccggactgggccgccgtaccctgggcgaacggattggcgttcgccggcgcggctgcggctgcggctgcggcaggctgcgatgccggagctgcgggttgcgctgcgggcgtttggccggggcgtacgccaaacgcttcggccgaatcgttgccaccagcacgacgttcgccgccaccgaccgacatgagaccgagcagcccgagcgagatgccgcggcgattggtcttcttgtggaaccagctgaacgcatttgcgttcacacgcacgtgttgccccgagaaaaactcggtcttgatgcgtgtggtgttcagcggcgtggcggccagcgcttcgcccgaatccagatacagctccggagcgtattgcgacgacatgcgggcgatcagccagttgtccggaatgccgggcgtgggcttggccatcgaggagttcaacttgggcgccagttcgtggccggcgagctggcccgattcggaaaccgcagtcatggcgctgaccagatcgctttgcgcttccggcgggaatgcgacgacggcgtaatactccagcggggcatcgtccgccttgagcttgttcttttcgggagccgcgagtgcggaatacaacaggatggcggtgtggtctggaatgctcataggtatctcagttctcaggtctcaggttgataggaagcggcccagttcagaaccgcgatacaacggtattacgtatgtggtgagatgtcaagcagtttcgaagggtctgcggcggcgcatctctgcgcgcaccgctgccagaccttcggcagtcaattgggggcgacgccgcatccggtcaacatgactggcgtctacgaatgctacatcacgcccacgcagcggctgtcctgcgttgttcagaaactgcggcttagtgtgtttttgtagccaccaactgggcttaatttggaatttccgcccgcagacgctggttccggtcattacgagccaaactgtttcgcccggacttatgtccacacacaggaaaggccccgagcgaaactcaccggggttgatgcgtcgaacccgggaatctgcgaagagcacggcagtgtcgagataagccacgattccgggttggatttgatcgagggttaaagccatcagttgttctccgcctttccaaggtactttgcgaacgcgtcgcgcgcaccgctcaggttcttgcccccggccggcgagtggatgaggacgtcgggagcgcgtccaatcgccgcggtgatggcttcggtcgggatagcggtctcgcgcatcttgcctatgctgggcggcaccagcaggtcgtagcgctcgtggatgagcagttgttcgatgaccacctcgggatttacccacatctcggcgcccttgcgccgggtcgtcttgacgactgggtctcccgcttcggcgagcatcttgacgcgctcgcgcaggtcgtcttcgaattgcttgaacgcgctgcgtgcgccccacaggtgcatcacctcttcgggcgacaggtcgaccacggcccgcctgcccgactctacgtccaatgcggccgtgccgtactcggacgcggccgggcaccagcgggccgacgggcagtacttgcagtgttcgccaggtgccgggggcgtaccgcccgggctgctggccgcccgggccaccgcatgcacctcggcgtcgagcttggcgcgctctgtggccagccactcaggggtaagcggcgccagcacctggaacggctcgccgaagcgaatgcgcggctgatagacgaatgcgccagcgtgcgtcgggtcgatcttgtcggtgccgagccagtcggacgtcagcactgcgagtgccccggccacctgctcgttcggctcgtctaacgtaccgcagcctaccggtgacccgccgtacttgtagtcgcccacgaccaggcggcgcgcgacgccgttccagagcatcacgtccgccacggtgcgcaattcgaccccgtggatgtgcgcggtgaaccggaattccggtacggcggacgacgcggtcgcacaatccgaaaacaacgactgcgcgtgcgcgacgtactggtcggcgtgtgcgtcgacttgcgccacccagcgcgtgacgccctccgccgagtaatcgaagccttcgagtccggccggcggctgcaccggcactgtcgagcgttgcgtcgacggggcgaatgcgtccaatacgcgcgcctcggccactttgtgcgcctcggtgccctcctgcgcggcggggccagactgcgtgcggatccgaggcagcacggctgacagcgcgcacttggaccaacggaaacggttggacatggtgaggatgggccgtgacgggtccggcacgaccagtcgtgcgccctcgggtaggtcggacggtgcgggaaagtcgaaggtcatgtggtttcctgggttgtaaggtgcagtcgccaccctacatatccacagggcagatgtcaacccaaagtcaactattcacgcaatagtgaaccaaacgtactagatgccagaggataaagctcttaattctctatatttaatgccaatgaaaaaaaggaaatttaagtcgatataattcttttgatttcacgttttagatatagagaggtttgttggtactttgcgtctgttcctctgcgtcgtgtacttttggttcatgtggtgcggggagacgcgtttcggtccagatgcgatacactccgcacatgtccgaccccacgccccatacagaactcgctccgatcaaggcgtcgttgatcgcggacttggtcggcttgctgaatctcaacttggcccaagtggtcaaggcgtctgcggtcgggtgtccgacatgcaagggcctgggcacggtcggtgacagcgaggtcggtcaggacgtgacgtgcccttcgtgcggtggcgttggtgcgatcgaggcgttcgtgctggacatggacgccatcaaaacacccgaggtgggccgccacatcgagcagtgggagtacaagcagggccagttcgttccgaagtttcggcctaagtcggcggctttcgcccagctgaccaagatcctgggcttcgacaaagcagtgctcgaggtggccggcgccgtggccttcgccgacgcgctgtcagacgagcagcgcgcgcagatcgtggatcaagtgcgtgaactggctcaggccggcgccctgtgaacgcgcaactcgtcccagatcccgtgctggccttgatcctcgcagcgcgcaccaatttcgcggcgttcgtctcggcggtgcatcgaccacgctttgtccacagtcatttttcgttgacggtatgcaaatccctggatgcattcgtggaggacgtaatcgccggcaagcgtcccattctggacctcacggccccacctcaatttggcaaaagttcgcttatttcgcggtgtctgccggggtatttgatcgggcgactaggccccgcgctcgggcaatgtcgcgtggcgctgtcgtcgtatgcgctgtcgcgcgccaaggcaaacctacgcgacgcgcgcagcgtgatggccgagcccatctaccgcgaaatatttccacacgccacgctgataggctacaaggtcggtcaacacaccgccgactacttcgaccacccgttcggattcgtcaaggcgcaaggcgttggcggcagtctcacggggttctctatcgacgtcgggcttaacgatgacttaacgtccgatgcccaggacgcacttagccagaccgtccaagatgggcaccttgactggtacctgacggtcttcggtacccggctccagcagcgtagcggacaggtaaacatgggtacgccgtggtctgccaacgacatcatggcgcggatcaacaagctgcacgagggaaagccgaactatcgccgcctgagcttccccgccatcaacgctcctgacgaggtgggcttcgacccggatttgcccgaaggctcgctggtaccggcgctgcacagtgaagagaagctgcgcgagattaaagcggccatgtctgaggcctggtgggcggccatgtaccagcagcgcccgctttccgaattgggcgccattttcggcaagggcggcgtgcgctactaccgcaaaaccgacctaccgacgcaattcgtccagaccatcatgaccgtggacgccacgttcaaggacgacccgaagcggagcgacttcgtgggtcttggtgtgtggggaaagacggcagacgaccgcgtatggttacttgcacatcgacgtgaaaaattgtcgttcacgcgcacggccgaggcgatcgtcgcgcttaagagcgcctacccgcagtgttcgcgcatattcattgaagccgcagccaacggtcacgcactggtggatgtactttcaaagcacgttgtgggcattgtgggtgtgccagcgcttggtagtaaagaggctcgctggcatgcggttgcgggcatttggcaatccggtcaagttctcctcccacaccccgaagaagtcccgtctattgtgcctgtcgtcgcagaaattgttgcagctcccgacgtgcgtaacgacgacatggtcgactgcatggccatggcgctttatcagctttgcatgcgcaacccgatcagcagcttgatcaatagtgacatcttgcggatggctggggcgcggtagttgccgcgcgcgcgccgcttacttggtcgcactttcgtgtaacatcgcgtcaaccgccccggagcccgctagatgacccgccgctcgactccccagcccgcaccgcaaccgcggcggctcgccatatcgcccgtcgacctggcgcgcgccgcggcgggcgacccggcacgtgcgacgcagacctcgctatctctggcaaccgcagaaccggtcgacaccgagcgctacagcgcgcgcgagcagcaagcggccaaggccgtacacgcgatggactacggcttcagccgcggcaatgcgaccgacgcgctgtcgttcgtctctgcgacgggctggccgggcttccagaccttgtcgctgctggctcagctgccggaataccgcaccatgcacgagacgctcgccgacgaggtcgtgcggacgtggggcaaagtggtcagcacgtccaaggacgccgctgcggcagacaaaatcacgcagatcacacagaagctcgagcagctgaacgtccgatcgcttatccgtaccgcagtaatccacgaccaggcatacggcggcgcacacgtgttcccgcatctgcgctccggtagcgtggacgttcctgccgactctccgctactgctcacccctgcgttcgtgacaaaggggtgcttgcaggcgttctcgtgcgtggagccgatgtggctcactcccaacgcctacaacgcgaccgacccgacgaagccgaatttttacaagccgtccagctggtacatgctgtcgacgatcgtgcacaccacccggctattcaccatgatcagccgaccggtcggcgacatgctcaaggccgcgtattcgttccgcggcgtgtcggtctcacagctggcgatgccctacgtcgacaactggttgcgcactcgccagtcggtcagcgatacggtcaagcagttcagcatcacgtacctgaaaatggacatggcgcagctgttggctccgggcggcgcccagtcgttgcaggaccgcttgaccctgttcaacctcaaccgcgacaaccgcaacgtcggtgcggtcgacatgacgaccgaggacttcgcgcagatcaacaccccgctatcgggtctggatgcgctgcaggcgcagtcgcaagagcagatggccgccgtatcgcacataccgctcgtcaagctgaccggcatcacgccggcgggcctgaacgccaatagcgacggcgagataagggtgtggtacgacttcgtcgcgggctaccaggtgcacaacacaggcccgctcatggagtggattctggatatcgtgcagctctccgagttcggcgagatcgatcccggcttgtcatgggactggaacccgttgtacgagctgaccgacttggagctggccgacgttcgcgagaagaatgcacgcaccgatcagacctacctcgaggcgcagatcgtcagtggcgacatggtcgctcagcgcttggcacaagacccgaattccgggtacgccggcatactggccgaccgcgacgcgctggacgaagtgcacgacttggctgaatcaatcctcgctgaagcgacgaccccacaaccgcaggccccaatcgatgagcccgatgctgaccaacccgacgcgcaagcagaagcaactggcggtgatcgggccgtcgagcgcagctgaacagcagtaccgcaaggcgttgcagcgcgccgtcaaggcgatggccaaaagcgtcgagtattgggcgcttgccaaataccgcgcagcgttggttgccaatcaggacgccgagaacatcccggatcccgaggccgcccaggacgccacgtccaaaacgccattcgacgtgcagcgcgcgctgttcaaagaactggaagccctgcgcactcgctgggagacgtacttcaaggatgtcgccaagcacttggcggtcgacgtggtcaacgcggcgtaccaagcaaacaagacggcgtggcaaggtcgcgtccgcaaagagggattcgacatcccgctgcaactgtcggccgcacagcgcaccattctggatgtcaaggtcaacgacaacgtcgcgctgatccggtcgatcccggagcaatacttcaccaagatacaaggcgacgtgtctcgggggttcctcgccggtcgggatctggaagcgatcgctagtgagctgcgcgacaccggaaaaaccacggtcaagcgcgcggccctcatcgcgcgcgaccagtcgaacaagctcaccgcgcaaatgaacagcgcgcgccagcgcgagctgggcgtgcgttacgcgtactggaagcacagcacggtcgacaaggatccacgccccgggcatatccgcgccagcaaagagctctggatattcgacacgcaggtaggcatcgatttcggggatcagttcggcttcgtgctgccatcgatggcgatcaactgccggtgcgggtcgcgcagcatcatcccggcgatcgacgaagacctcggcccggacgacttgctagccgttccgggcttccctggggcgtttactcggaagccgaagacgcgttagcgccggctcgcgcgagaagcaatagcacttcgacacaacctttgcgccagcgccgtacgccggcatccgcgcacacgtgcagcgtttcttcgtcgtcgtgcgttgcataccacttgtaagcaagttcgcttgggctcacgactgcacctcaccccgggctttggctagcacctcgagcgccattacggcgtcagacggctcgagcggcctacgcagcgtggcaaggaattcgagtgcgtcgtacaactcgggcgccgtgaccattacctgcgcattggcgcggcactgagcctccaagatgccttccccgcccagatgttccatggattggccgtccgcaatcgtgtgcccgtcaggagcaacgatgtagaacacggtgtgcacgccgtcggtgcagccatccctgaacttcacagtccacgggccgggagtccactgtggcgcaccgccggctttcgcttctgcttggtcgttcatgttgttagttcctgcggttgtggtgggagtcactttagcgtgaccttttgtgcttgtcaacaacaacgcttgcacgtttatgccacacagctatcatcgcgcgcatgcctgttgcaaccgctagttacgcgttcgataagaagtcggcccggtcgttcgatgccgacgggcgtatgcgcgtgcgcgactgtgtgctgtccgacgcggatatcaacccgtactacggccgtgagatccccgggtggaaagaactcggactcaagccggacaccgtgtacgagatgtatcgtgatccggacgcgctcgcgctcgccgccgactcgttcaacggcttgccgttgatgatccggcatatcgcccagacggccgacgagccgcgcaaagagcacaccgccggcagcgtctacaacgtccggttcgagccgccgcacttgcgcggcgatctgatgatcgcggacggcaaggcgatcgagttcgtccagtccggcatgctggccgatctgtcgtgttcctatcgctacaaacccgaaatgacacccggcgaagtcaacggccgtcgttacgacgggcgaatgatggcaatcgacggcaatcatgtggcgctcgtcgaagacgggcgcgcaaccggtgcgcacgtcgctgatagcgcgctctcttcccaaactggagcaccaaacgtggatccgatcgaaaacactcccgcaccggcggccggcaatgccgagttggcgcaagccctcgtgctgctgaccgaacagctcgaagcgctgaaagccgacgtcgctgcaatgaagggcgccccgtccgacgcggataaacccgtcgaaggcgtgccggccagcgtcaacaccgcgcacgacgaagacccggacaacgacaaagataaggatgacaagccagtcgcgatggacgccgcttccgtgcaggccgttgtcgacgctgccgtcacgtcggagcgcacgcgcgccaaggcggtcgagcaggccaagcgcgattgccgtccggacctgggcgacatgatcgccatggacaacgccaacgacatctatcgcgaggcactcaagcagcgcggcgtagacgtgtcggcgattcccgcaggcgccgaaatggcgacctaccaggcgatccagtcggtcacgcgtggctcgcgcctggatgtcaccgtgtcgcgtgccaacgacagcgcttctggcgcgcccgccttcgacacttcgcgtattcgcaatctcggtcgttaagaccaatcctcgggagttactgaaatgccctttcaatctactgttgctgtcaacccggcgattggcgtacctggcgactttgcctcggtcaatccccggcagttcgtggtgtccggtacgctgaatcagcgcatggtcagcgccccggcctcgccgggccccgcgttggccggcaagttcggtttgctgtcggcgaccggcaccgtgtcgagcacccccggctatgcggccgcatcggcgactggcgccgcaacgcgcatcggcttcgtgcatcgctacatgggcgcggcgctgatcaccacctggctcggtgaaacttccatgaccatccagcctggccaagcggtcgagctgttcgcgatcggcgatttcttcgccacggcagacgcgatcaccggtactccggtgcgtggcgctgcggtcatctgggatccggctgccggcaccatcaacatcggcgccgcagtgtcgagttccacgatcgacaccggcttcaagttgctgagcgagacggccgtcgcaggtcagaccgtcatgatcggcaagaacggcgcgtaagcggccaccatcgacaacctcatacaggaacagtgaccgtgaacgaacgtcaaaccatcaatgacttggcccgcgtcggcatcgtattgcccgatacggtcaaacaggtctccaaggaagcatccgcgtacgccaacgacgcgatcagtctggcccctacgctggtcaccggcgcgagcgccggtatcccggcgtggatgtcgatgtacgtcgaccgccgcgtgatcgacattcagctcgccccgatggccgcagagaagatcctgccggtcgtcaagaaaggcgactggaccacgcagtacgccgtgttcatcaccgccgagccggtcggtcaggtcgcgacctacagcgactggtccgccaacggcatgtcgaacgcgaacgtgaacttcccgtcgcgccagaactatatctaccagacctggaccgagtggggcgatcgtcagctcgccatcatgggcgaggcgggcatcgactgggcagcacgtcaagagatcgcctcctcgaccgtgatggccaagttccagaacagctcgttcctgctgggcgtggcgggcatcccgaactacggcctgatgaacgacccgacgctgaccgcgccggtcgctgcgaccgtcaactgggcgaccgccgagccggaagccatcgcgaacgacgtggtcgcgatggtgggccgtctgatcgcgcagtcggcgggtctgatcaccggtcaggaacgtctcgtcatggcgctcgcgccgtcggccctgaacgacatcaaccgcacgaacagcttcggcctgtcggccggtgccaagatcaagcagacctacccgctgatcgagtacgtggccgtgccggaatacgacagtgccggcggtcgtctggttcagctgtgggcaccggaagtcaacggccagccgtctggcgaagtggcgtacagcgagaagtaccgctcgcatgccatcgagcgctactcgacctaccagcgccagaagcacagcgccggcacctacggctcggtgatctacttgccgttcgccgtcacacaattgttgggcgcgtagcccagtaacaccgcaggaacaaaccccgcctaggcggggtttgttttgcgccacgtccagagtgtcttgccgctatcccacacccgcaaggcccctaccgcgtcctcgatgtcccactcggtgcgcgagtcgttagcggggtcgaacgctgcagaactgccgatctgcaacagccgcgttggtatgtgcttgcgtgcccaggccgacttcggacgaaacccaagcttccggtgatacacccggtaatccggctcgacttcctttgtcgcggtgaacccgagcgcctcatacacgccgcctgcgaaccagtcgtgagcgctgtagctgacgacgctctgtgcgcaaagaacggcgacggcatgcttaaacagcttagacgcacctccacgtacttgtgcactcgtcgcgaaccgcgtcaagtcccacacgcccgacttggtgcggttgcgcgaataggcatccaagttaaacgtcatcaccgccaccaggccgtgcaccgggtgctgcagcccgaatcggcgcgtgtagacccgccccggctgctgcggatggtaggcgtctaggaacgcgattgtttcggcagtcgtaggctccacaatggcgcactggcgcgcgtgcagcttggcatcttgcgagcagcccaacgcgttccggatcaatcgttcaaactgcggacggcgttccttccattcggcgcaggtaacagccagcaaccgatagcccgcggccgcgacagccgtccgtttatcgcgccccgccgtttttgagctgcgccggtcggagtgccagtacaccccgttcagttcaatagcgatgcgcgccgagggcacaacgatgtcgagttccttcggcgcaatcagtttccggtcagaaccgtaggcgtctgatttaagtgattgcacgaatgccagcaaatcacgttcggatggtgacgggccaaacttaccgcagcgcgggcagccgtggccgatcaagtgattgtttgcaatttgctgaaacggcccgtgctcgcgacagtgaattgtcactcgctcggtcgaacgcgagtagtcatcgatcgaatagtcgtagcggtcgccatgcactgcgcgcgccctcgcggcaaagtcggcctgcgtgaagaaccccggtgccgaagtttcacgtccgcacgccgggcagcccgaacccgcaacatgtgcgcccgctttctgcgtgaagcccccgtgcttggggcaaatgatcgacaccgtgcccagtgcgtgcgtgtacagcgtctgcgcatagtcgtagcgagcgccgtgcactgcgcgtgctctggcgatgaagtcctccgccgcggccgtgcgccgtgcgaggccacgctcggcagccgcgcacgccgggcagccctgaccgccgtttgcgtggtgtgccggcgtttgccggaacgggccgtgcgtgcgacaaactatcgatacaggatcgtcggcccgaacgtactcgacggccgaatagtcgtagcggtcgccgtggaccactcgagctttttcgatgaacgcgccgaggccttttcgctgcgtcaaactgcgagcccgaaggccgcagtcggggcagccttgcccagcgcgatgtttgtccggcgtctgcatgaatgcgccatgttcgcggcacacaatgcgcaccggcgttcgcgcatcgatgacctctgcggggtagtcgtagcgggtgccgtgagtgtgccggaaacgcaccaaccatccgtcgtgtgggatcttgcgagacatacttactccagatacgtgaggtgaactttaatcgcacccgacacgcaatgcaagcgccgtattcgtgtatcatcgcacgcgtaaaccacacctacaggaacaattgcaatggctcgcaaccgcaacgacagcaaccaaccgtccgacagcgccggcaccgtcaccatcgcgtgccgcctgcctgcgggcatgcgcttcgagaatgttcccggcatgccgggcggtgtgctgatgatccgcggcagcaacgacgactgggcgctcaagatgatcgaagagtacgaagcgcacggcctgaccagtggcgtaccggccgaagcgtgggactacatcgccaaccacccgtactacagcaaggccaagtggtacaccagtggcgccgtgtttgcgaccaccaaggccaaggatgcgatcaaggaaacccaagagcgcggccagaccaagaccggcttcgaagcgctggaccccgaagaactgccgggcaagatcgaagacgccgtcaaggccgaagccaagcgtaattgaccggagtagcgcatcatggccgtcgttgtctttgaccccgcagcattcaaagccgcgttcccagagttcgcgacggtccctgatgcgcgcttgaatatcctgttcctctctgcgaccggcgtcatcgacaacaccgatgcatcggtcatcgcggatgtggcgcgtcgctccgcgattttgtcgctggtcgtggcgcacctgctcgcgcagttcggtacgactgtcgtcggcaccggcggggcgaacccgtccggggtcgtcggtcggttgtccagcgcgaccgagggctcggtgtcctcgtccttcgagttcaacattccggcgtctgctggcgcggcgtggtggaaccagacccagtacggcgcaatggcttggatgttgctcgccccgtttcggtcgttccgttacgtggcgatcggccattccggcgagggctatgcccacgcgttcgccgatcggcgcctgtaccccgagggcgcgcagttgctgtccgaaaacagcgggacgcccaacggcgtatgaccaccgtccggcgctcgggtgtcaaactcccttcgcacatgcgcgagcagttcgtgcccgcgagcgtcaaggcaggcgtgctcgagggcgcgacatacccacaggatacatacaccgatcaccgtaccggccagcaagtcgccgatgcccgcggcgggatgcccgttgcggcaatcgctcaggcgctcgaatacggtcatgggcagaaccatccgcgcccgttcgtgcagtcgacattcgccgcgcagaatctcgcctggtcgcgtggtttgacccagttgatcaaggcgggcgcggcgaccgacacggccctgcgcacgattggactacgcatggccgaagacctacagcagacgatccgcgactggcctgcggacaactccgaggattgggcggcggtcaagggcttctcacatggcttgatttttacgggacatctgaccaattctattgactcggctgttgtgctgcgcgacggcgactacggcgaggatccaagcccgtgagcggcctgaacctacacgcgatcgtgcgtggcgctatccagacggtcaatcccgatgtaccgggtgacgtctacatatcgactggcgccacgacggccggcggcatccgtacaccgacgttcggcatgctgccggcccaacgcctgcaagtgcaggcgatgtcgcatgaggatctgtaccacctcggcgggttggccttcgcaggcaacatgcagaagctctacgcgtacgggcagtttgccggcatcgtgcgtcccgacggtaagggcggcgacgtggtgcgactcggcaccgaatggtgggttgtccagcacgtgctcgagtggtggcccggctggtgcagcgtatcgatcacccggcaggtcaacgccgcgacgttggacgcgctgacgaaggcgttagccaacggcgcggtgccgaccttgggggtgtcctgatggccgccgcgctacttaccccgaacgaagaccagaccttcgcggcgctgttcgacttcatttccaaggtgctgggcctcccctacgacaccgaccagatcgtcaaggggtttcagaaccttgtcgcgacgccgaccggtagctatgtggtcgtgtccccggggatcatgcagcgtcaggattttggacgccgcggctacgatccggacggcaacgcgacgatcgtcggtgcgcaccagacttacagctatcaggtggactgttacggccccgaaggtccgacctgggcgtcagtgctgcacgctgcgtggcgcacgatgtgggccgtggacaacatgccgtctggggtgctgatgcccctgcactcggacgcaccacagcagcttaacgttgtcaacagcgaaggccagttcgaacagcgtttcatgatccggctgttcggccaggtcaaccagcaagtcacgctgccgcaagactttttcgacgtggcgactttggattccatcattgtcgccgatcaactatgattggcatatccgaccggagagcgtgacccgtggcaaatatccctatttcgcaaatcgtaaccgtcaacccggcggtcgtcagcgcgggcgggccgcagacctcgctcgacggtctgttcctgacgcagtctacggccgtggcgccgggccagctgcagccattctacagcgccgccgccgtgactggcttcttcggtgcaggctccgacgagtccactgccgcgcaggtctacttcgccggcgttctcaatggcggccagttgccggcgactctgacgttcgcgcgctacgctcaggccgcgacctcggcccaggttatcggcgcaccgaccggcctgaccctggcgcagctgcaggcgctatccggtacgctgattgtcacgaccgacacccaacgcacctcgagcgcaatcaaccttgcggccgccacgtcgtttgccgatgctgccgcgcgcatgacggccggtttcaccacgccgaacttcgcgatcacttacgacaacgcgcgcgaccggttcgttttgtcgaccaccgcgaccggtactgcagcgaccacgtcggcgatcaccggcacgcttgcctccgccgtcggactatccgctgcggcgggtgcatttctgcaagccaccggtctgcccgccgatacggccggcaccgcgatggaccgcgcgaccgtgctatcgaccaactgggcgatcttctcgaccatttgggcagcgacgctagccgagcgcaccgcactggcggcgtggaacagcgccaacgggcagaaccagttcatctacgtgggctgggacaccgaagcggcgagcatcgtccccaacaacgcgtccagcttcggcggcgtggtgttcaacactccgtatacgggcaccgtgccgctgtacggcggcctggtgcacgcagcaggtgtgatggcgtgggcgggcgcgacgacctacgacgtggtcgacggacgcaacgcgctagcgttccgtcagctcggcgcaggcgcgacgccgtcggtcaccaacttggccaccgcgaacgcgctgctgaccaacggctatacctactacggtagctacgccaacagcgccaacaactacagcatctactacaacggcgccctgtccggcgcgttcgactggtccgacacctatctcggccagatctggctgcgccgtacgctgcagcaggcgctgttcgaaaccctgttggcgtacaactcgctgccctacaacgcggatggttacaacgcgatctaccagggcgcacaggccacgatcctgcaggcgaccgccgccggcatcatccgcgaaggcgtgacactgtcgccgtcccagcgcgcgcaggtcaaccagcaggcgcgcctgcagatcgacgaccagttgtcgacggtcggctggtacctgcaggtcagcgacccgctgaacgccagtgtgcgcaccgaacgtggctctccggtcgtcaaattctggtactgcgatggtggcagcatccagaaaatcgacatctcttccaccaccgttctctaagaggcgtcgtcatggctgctaccctcaccgttgcaaattcctcgatcgcgatcaccgtcgagtcgttgtacccctcgtcggtgctgctgtcgggctacgccgcggacaacgtgttcgagacctcggcggtcgtgaacaaagagacctcgatgggcatcgacggcaagttctcggccggcttcgtctacaacgagatcccgttcactctcaccctgcaagccgacagtccgtcgctcatcatcttcgagcagatctggcagtacgagcagaccaaccgcaccggcctcgatgtcggcatgaccgtgacgctgccgtccaacggcaagcgctacggcttgcagaatggctacatgacgtccttccgggcgccgagtggccagcgcatcctgcagccggccgcgatcgagttccgcttcggtcggatgacgtttgcgcgcacctgattctcggtgcggtaaggcaagaaacaacaaagcccgctttcgcgggctttgttgcgactgggctctcccggtcagtcacgtgctggctgcgccttgcggcgctgcgacaacacgtttattcgacgtgtcatcaaatccgggccagcccggcgaggtgcttgtagcgctatcctgtagcgctatcccgatgagcaatgcgcggacgcatcttacaccacagcgcacgtgctggggaactgcgaggacgttacttgccgaacagttccaggcaggcgcgcagcaactggcgctgttccggctgcagcttctgcatcggcacgccagcgatgccgactgcggccttgatcgcgtcgatcgtcgcgacgctatgggccgagatgaaatcgcgtgcgatactcaacagcggcagcaacgcggcgtcggtcgccggtgcagcgtcagtcgccgcggcgatcagcagcccgagcgcttcgtcgtccagaccgggcacagccggcgatgcggcatcgggttcgtcgaccggcagcgtgtgcgtctcggtcgtttccggaacttcgggttctgcaccaggctcgttagcctttgcgttgtcggcttcgatctgcgccttggtacggcgcgggcgcttgggtttctcctcgaccggcgcctccggcgggtcgatatcggacggcaggccatcgccgtcgccaggctccaggatgcggtcttcgtcgggcacgtcgacacgctcgatcttcaagtcattgatgacgactcgcggaccgacctgcaaaaacgcggggttgagaatagcgacgaactccgcgagctcatcgatcgacttgaagttcagctccatgggttactccgtggttgtgggtttgcggcgcggtcgacgcagtgatcgggtggtgtattcggtgaccagctggccgcggtacttcgcctcgtcgcgccgtacctcgtcctgcagcacctgcatgcgctcgcggctggtgacacgccggtagcgcatggtgcgcacctgctcctcggaaatgccgagcaggcgcgcggtgttagcgtgcatgccgatcgcatcggtcagctcgcgcagggtccaagcttcgatcggcttggtgaaatagtcggacgggtcacacgttgtttcgggggcagccatttggtcagtctcgttgcggtttgcgataagttacgcgctggtgcgctaatagtcaacccgccgtagtgttgcggtggtagccgccgtccggcaagtgtcgatggcggaacgtctcgaagttgattagtttgtttgccgcgacatatgcagcacctgcacatcgtcgcgagtcaccctcgcgaagcgattcgtaccagatgtcaaacttacggccacttcgagcgtcgagggccgccccaagttgccaagcgatgtataacgcgcttacatcgtgatgacgccaggcccacggggctagatcgaccggcacgtaccgatcgttcgcgatgtcgagcaacaagtcggcggggtacacgtacaccaggccgtagcgcaccacgaacaccggagtgtcgggatgcaacgaagcgagcggtgcatcgaggggtttgcagagcatcacggctcctccgggtaagtgcagatcatctggttggcttccatcgcgcaccgcgtctggcgctccagcacgtggcgctgcaacggcaaatcaaagtccatgacgtactcgcggaacagcgagtcgtcggcgttgtagacctctacgcgtaccattagcatgtggatgtctccgtggttgtggtgaatcaaacgtaacgcacaagttacggcttgtcaatcctttcgccaccgatccgaaacgaatcccgcagcgtccagcggcaggcccggcgcccaccgcggcgcgacgcgcagccgcgcgagcaactggcccaagcgcacctcggcccggtcgcgcggcacttcgaggatcacttcgtcgtagacgtggtggacgatcttctcagccggcgcgatgtcgagcatcgcctgccagaacagatcgcgcgctaggccctggaccatgttgttcgacaggatcttgcggtctagcgtctcgacgaagccttcgggcttgtcgtagacggcgagcggtgcagaagcgcccggttccagcacgagacgcgcattgtggtagctgatcgcgcgacccgagggcaggatcatgcgcaacgccgcggagtccttgacgaacgtcacctccgagcacatgccgcgcccgatcggcatgcggacctgtcggccgggttgatctagtgcgatcagcaccgcgtactcgagggcggcccaccagatggccatcttggagtggttctcgcggtacttccagacgagtttcttacgcaggtcgtcttccaggtacttgccgtagttgcgcgccatgttgtcgagcgcaccgtcgccgccaccgtactgcagcgacaggcgaacgaccttgccgatctggcgctgatccttatccacgttttcgacaggcacttcgaacacgccgctcgcttcgaccacgtagccgtcgatgccctcctcgaactcgactagcatctcctcgtcatctgcgcaccacggtcccaagcgcgcctcgatgcccgcaaggtcggcgcacaccaacgtgtgctcggggtaggtcgcgcagaacagcgggcgctgcgcgtccgccatagcggctagcggcggcccgacctccggctgcgacaggaaatcgaagtcgtcacgcgttgcggcggcgagatacgcttcgcacgcttcggctttgcggcccgggcggggccgcgccacgttgagaagctgagcgtcaccgcagcccatcgccgtagatcggccggacagtgcgccgtggtagaccgtgctgtgcatcatgcggccatcgacgtgcgcgcgcaggatcgcgcccgacttcttcggtgcccggctcgcgtccagacgcagcgcgagcacgtcgcgcagcgccggcggcagcgtgtcgcggctcaacagccccttgaccgtctcgcgcccggcgtcgtccatgtcctcgcccagcgtcgacgcgaacgcgcggatcttttgcacctcgctggccgatagcagcttaccgtcagtggcggcggtcaactcgtagtcgatcagcgcctcggccaactcgcgcatacgctccataccctcggcgccggccacgtcgcagccgaagccgcggtcgttgacctcgtagtcgagttgccagaattgctgctcgaggtcgggcattggcaccgtcgcctcccacagcgcgaccatcgcgttcgtgtcggtcaacgcgtacttgtaggtatgccgaaagtgctccggatgcgtgacgggcgtccactccgggtgcaccatcaactctttcatccacttggccccctcggtgtctttctgcaccgctaggccgagggctgcgcacgcacgctccagcgagcccggcaagccgttgtatcgggcgcgcgccgcactgcactgcacctggcgcacgtccagcatcggcacttcctggccagacgcacggagagctcgtgcgtgcggcccgttccacatgcccagatcgaacccggcgttatgcgcgacgaagcgcttacgcgcttcgatgtgctggttgacttggcgtggcacgggcttaccgtactcccacaggtcggcggtgcgcatgccgggcagaacgaacgtgaagcagtacgcacgggtcgacggatcgcgtaggtagcgtgccaagccgtggcgcttcaagtcgcacagcgatgcagcctcgaagtcgaggaacagagtgtcggtgttaggggtcatgtgggcttctcgttgtgtgggtagcgcagatgttacatcactgcgcggatgaattgcgccgcgacttcgggaacgattgcattgccgtaaccacgcagcgctgccacgcgggtgggtaccccatgagccagcgggaatgatccgggttcaactggcctgcgctttccatccctgcatccgagccaatcagcacctgtccagaagccgtgtagcggatcggttgcgctagccaagccactcttcccaacagcgcattcgtgggtacgttgtcgcatcgggacccgtccttccaatctcgtgctgttgcggctggccagcccgccagacacgcagccgctgccaagtccggcccgtgattgcgcatcgcttcctgcaacccgccctcgaatgtccgcacgcccttgtcggccagcgccgccgttggcgtgggccacccagtagagtcgctggcggatgtgcggcgcgccgacgcccgcagcgcacagatcggccgccccaacggcgtaggccgcaccttccaggtcagcgcatacaaggtcgagccagttgaggccgtcgaggcttgcaacctgctcgccaaaaacgcttggagggcggcactgttcaatgagccagtggaatgcgggccagaggtgccgctcgtcagcaaacccagctcctttgcctgccgcgctgaaaggctggcaagggcagctgccagtccagactcttcggtctgcgggccacccggcgagctggagggcgagtggccatccgccgatgccggcgaagaagtggcattgtgtgtatccgcgtaggtcatttggggttacgtcctcgatactgcgggtgtcaatctcgcacggtgggatcaatccttcgtctcgcaactcggctaaccacgctgcggctttcaggtcgtattcgttgaggtagttcatgtgggccctaaatcctatttgtaagccggatcatattggaaagtcgccatttgtccgtcacgcacaaatcgtacgtgagtgagccaaacaagtccatcctcgaacttggtgaacgtgatctccgtcggttgcgggatcaggtcgcgctgcagcaacacgcggtgcggctccttcggcagatcacggcccgtcgatacctcgaagtatttccgggcctgggcgaagaagcggttatcggcggtgcgccggtcgaagtccagacgcagctggtaggtgccaaccgccgtctcgtagtggaatgtgaggatgctttcgccctcaggcaccgagtaggaatggtccaccggaacactgcgggtctccacgcacagctcgtcgcgcaggatgatcgaatcctcgtcgtgcaggtcgtagctgtctccgatgccggagtgcgggtcttgcggttcgggcttgcgcgactgggtgacgaacccctggcgcggacggttgcagtttcggcacgtcatgtgctcggggtcgtttaggtagccgcacccaggctcgtcggagtccatcagccccagcacgacgcgcaagtcgcgttcctcgatgtcggggctgggtgtcgggaaacggatgccgctgcgctcgcgctggaccgcaatccctggtgcatccacgcgctcggcgctgcactcccacaagccggcccgtgagtcaccctgttcgagatccgcattgatcgggccgagccggtcgaagttgccgccggcgtccagcaccaagcagttctctttgccggcatacgggcgaaagccgcgcccgacgatctgacggaacaacacctgcgagcgggtggcgcggacgatcacgatcgcgtcgacgaacggggcattaaacccggtcgtcagcgtgcccaccgacacgatgtgccgcgtttccttggccaggtattcgcggataccctcgacacgttcgcccttgtcgagatcgccgtaaatcagcgtcaccgtctcgccggcagccaggagcgcggcgcgcatcatgcgcgcatgttcgacgttgacgccgaaccacatcacgtggtcgcggccgaccaagttttccagaccgacggcaatcacctcggcggtgactttcatcgcagcagcagccagctgcttctcgtcgaaatcctcgcccgaggtcttgacccccgcgacgtcgatctgcgggaagcgcaccgtcggtgcgacgatcggtgcgatgtagccctcgcgcaccaagcgattgaacagccgcccggtcgtcaggtcgtataccttggcattgaacaatccgcactgcgacagcggcaccgtcttcacgcctttctgacggaacggcgttgcggtcagcgcaatgaaccgaacgtgcgggttttgctcgcgcgcaccttcgaccagtttgcgaatcgacggcaacgacaggtcgaagccgtgcgcctcgtcgacaatgatgtagtcgatcggcccgaaccggcggatctgacgccacaccgactgttgcgtgccgaacgtgatcttgcgctgacgatccttacggttgagcgcggcgcagtatacgccgatgcccgacacgagggttgcagacaggtatgacgacgcttcgtcgcggttctgcccgaccagctcttgcgacggggccaggatcatcacacgcgcgctgggctgggtggctatcagtttttcagccagcatcgcggcgaccagcgacttgccgccgccggtgacgatcgccgcgatggggtgcacgttacgcgcagcttgcagagcggcgacaacagcattcgccgcctcgtcctggtaccaacggggcgtctttcttgtctgtgagggcatgggcgtggggtctaaggttaaacgaacatgacccggatgttaccgggtcatatggagtcagtcaataacacggggtggccggcgtcgcgtaggcgcgaatgcgacgcacccaatacgcatgaccttgcggtgtcggtcgccacacaaacgcgtggcgcaagctgtcgcacgccaaccctcttggcgatatccatcacagggccgccttgcagtcgcggatcagctgttcgagccaagctgcgcgagccgccatcgacgcattcgcccgaaagccctttcggcgctgccactggcccaaaaacatagcagggccacccagcgcgcggccgattagattgcaacaatcgttccgtgcatgggaaaaacgcgccccgtagcgcacttcactcgccgcaccaagggcgctacaaataccggccccgcggcgaatagcggcgggtaggtatacttttgcgtcctcgaaaagttggatcatcgcccggatgcgggctttctgctcgtcggtatactgaatgtccatggtggtatgtcctgtgggctgtggtgattaacgcttgactttcttcatgtagccggtgcgcgggcaggcttgccgctcggcatagatcggcttgatcacccgggcaagcgcgccgggattgaacgcgcgccaagggtgactagacttcggcttggtggcggtcatttgactgccccgagtcgatcgatacagtccgccgtagcggcacgcttgttgtcgcgatcgacgatcgcgtaagccgcctgggtgtaggcgccgacccagtcggataggtcagtcgacacgggcggcggatccagcgcaatcgcggcggtccgctgttcgcacagcacacgcgcttgcgcggcttgcttcccaggcacggagcgcgacgtcgcgcatccgctggaaacgctcagcgtcagtagtagcaggatcagtcttaacatgggcgatttcctgttgggcattggtcagttgggtccgggtgtcggtggtctcggcgtcgacgcgcatgcgaatgtcgtagccgatggtgatcgcctcggcctggtaggccaccgcttctttggtgacctgcaggtcggcttcggtggtcgcgtcccgtgcccccttggcgtacagccagtacaggccgcccaggaccgcggctacgaggacggtgtagatgatggcgcggattgggatagggctcatagcttcgggtccaaataacgaaaggcgagcaaacctgcgtcgacgatgccccttggcggcaaagtcttggcgaaatccagtatccgccgcagggcttcgagggtctggaatggcaaaactatcgctgcccggtcgtcgtggatatggtcgctcatggtcgatccagtattttcgccaacatgcggtctgtacacccacgacactcgaactcgccatcggtgcgaagtctaaacccggctctgcgcgcatcttctgtcatgccacgcaccgggatgcgccctgcgcgcacgaattcaccgggcccggcccgggc

SEQ ID NO: 34 - DNA, 45279 bp, unidentified
  misc_feature 1..45279: note = the genomic sequence of a bacteriophage
  source 1..45279: mol_type = unassigned DNA
gctgcggtctgggccgcggtcgcagtttgtgcagccgattgggctgcagtctgtgcggcgctggcagtacttgccgccgcggtcgcagtacttgccgccgtcgatgcggtagtcgctgcggtctgggccgccgatgcagcagtcgttgcgagttgggtcgcggcggtcactgtgtcgtacaggatcccggcattttccatcagcgcaatcgcctgcttgttcgcagcccccgcaggtccgccaagtacccgatcatccggttggatcatcggcaccggaacgctgcccgggaattctgggatcgttgacactacgttgctccgaagtagtactcgccattgtacgacgctgcgccatcatagagcagcgccatttcgttaattgggcgcgccgtcgcacctgagggccgcgtcggcacgactgtcgccccatttgccgccggatcgccgtaaagcagaacgaagcgcgtgccaaactccgcgaacacggggtccgcttcaccttgcagatcggcgaagaacaacgcgttcggtatgcccagataggtgccggacggaatcaggttggtgcggtccagacagcggcgcccagtcaccactgggatgccgtcggaaagcaccgagatgtagagtccagtttccgtagtgcgcagcgtcatctgtacgttgcggtcatccagcacgacggagaacgcttggtttgcgctttgctgcacgggaatctgctgcaagctcataccgcgacctgcgcaccgttaccggcctgatccgacagcagcaacgtgccggagagcactcgcggcgtacgggccaggtcgaagttcgccaaggccgtcgcgcacccgggcaccttgagtgcctcggtttgaaagtcagattgcagctggccgaccagcggagctgtacccaggtacgcggcgtagtcgatgccctgggcggtgtcgaagtagacctcgccgcgccaggcccgcgtacgggtcgctacgtcttgagccaggcgcaggcccggcccggtttgcacgtcttgcgcggtgtcgtctccgaccgtcgcgacgttgccgtaggcgtccagtgtcagatcccaaactgccgggtccaatgcgagcgtgtcgtttgccatgcgcgcgaggttacttgccgctgcggaccccgtcaatgctagaggacgctcgcgcaccacatgaaccaaaagtacacgacgcagaggaacagacgcaaagtaccaacaaacctctctatatctaaaacgtgaaatcaaaagaattatatcgacttaaatttcctttttttcattggcattaaatatagagaattaagagctttatcctctggcatctagtacgtttggttcactattgcgtgaatagttgaccttgggttgacaactgccctgtggatatgtagggtagcgactgcacctcacaacccaggaaaccacatggacatcgtcgccaaagcccagatgtacgcccaggaagtcaacgcggaggccgggtggcgcgtgttgaccgtcaacttcgagaagcccaacaaagccggcggccccctcacgctggccgaggtggctgccttcggttctaccaacgcaggctggttctcggtgcaggagctgtttttgctgatccgcaaacagtcaccagccaaaggcgaggccatcgcgaccggacgttcactccgtaccgctggttacccgcgacgtcagctcgggctcactgcccgttttatgtggctagtcggcgcagagctggacagccccccacaaccaagcgcagactgacctgcacacacccgtcacccacatgacagagcgaccacatgcctgaccacgccccaacacccccgattcgcttcaccctgatcacctcgacgtcttgtgagttggccaagtcgttcgagctcaaagacggcaaggtcacgagctcggcaatcgcgcacatgaccgaaggcttcgccgaagtgcgcgaagtcgcgtcactgctggacttgcgcaccgttctggacaacctcgaaccgcatcacgcgatcacggcaggcctgccgatcgtcggcaacacgccgctcacgactcgacgcggctccgagttcaacccacacgcggtggctcggaccaatgaagcgttccgctactcggatgccccggggttgttcctgatcgatgtcgacaccgagacctcggtctacagctcagtcgaggaagtgatggacgcgctggagtcggcttctccgtggctgcgccaggcattgcgcgtcggtcgcccctcggcatcctcgtacgtcgccgatcgcggactgcgcggcgttcacatctaccttggcgtcacccgtggcaccgacatccccgcgcttgcgcaacggctgcagatcgatcaatgggccgccggccgcggccgcatcatcgtgtcgcgctccggcgcgttgctggtgcgccagctttccgacgcactggtctatcaaccgtcccggctgatgttcgaagcggcacccgtgctaaacgacggcatcgcgcgcaacgtgcccgacgcgcatgcgtgggtcgcgcgttcgtcggatacctccaagagcgcgaaataccgcaccaatgaagggtttctcgacgtccaagagatgccggcggtgcgtgatatcgcgattcgtcgtttcgaaactgcggtgcgtcaggccaagaacaacatgcgcgtcgaggccaagcgcgttgcactggactaccacaaagccaacgcgttagcggccggtcgcgacgacggcgaccgtatgggcgctcttgcgctgcgcgcgctgggcgacaaggtgctcccgccgtcctggccgctggtgttcgaacacacgcccgaaccgctgcgcatgacggtcggcgatgcaatgcgtcatttcgaccaagccactggccggcggtgcgccgatccgttcgactccacccgacacgatttgtcgggtggcgatttgcgcgccgccgaggtggtcacgctgcgcggtgtcaagggcgtgtggtcgcacaagctgggggatttctttgccttcggggagtcggatgcgtcggagctatcacacccgctcgagcttgcggccgaacggctgtgcggcacgatcgaggaatggcccgaccgcgccgacaaacgccacagcagcgtgcagaatctggtgttcgccaccaagctgctcgcgcgtgaagccggtctcatgctcacctacgacgtctgcgccgacaagctcaacgacgaggacttgccgtcgatcggcatgtggctcgaagctgtcacccgtcttggcgcctccacggtttcagtcggcacgttgcaaaccgcgctggagactgtggcacgcggccgaccggtcgacccgtggaaagacgccgtcttgtcgttgcccgtctgggacaagcgggcccgtctggataccattttcacggacttgtacggcacgccaggcagcccggcattgactggggccggtcaggtcttcttcgccggcttggtgatgcgccagctgcgccccggcgccccgtgcccggtggtgccggtactgattggcgagcaacgcaagggtaagggcctgttcggcgtgcagatcgccgaggcgatgggcgtgccgctaccctcggaaattgcgttcaccgaggatcgcaaaatggcgatggccgccgcgcggtcgccggtcgccgagttgtgcgaaatgtcgggcctgggcaagcgcgaggtcgaggacgtcaagcgctggacaaccgacacgcaggacgtctaccgcgcaccgtacgatcgccgcgaggtgtcgcacccacggcggtacgtgctgttcggcaccgcaaacaaacacgagctcaatcgcgacgagaccggcaacagccgcttcatgcccgtgctctgcgagacagcacccccgctggattgggccgtcgagttgccgcagatcctggccgaagccaaagcccgtttttgcgattcctgggccgagtacaccaagctggtacggtcggtgcccgagctggtcaaagcgtacaacgccgaggacatgcgctcgggccgcggtacggtcgattcggatctcgacgacctgctaccgccgatcctgagtaaattcggcgcaaagacgggccgtgtcggctcgctggagattcgcaccgcgctggacgcaacgccctcgggccgtaagttcagcgcgcgccaggccgccgcgtggctcaagacgcgcgggtgggttgcgacccaggacgcacgtggcttgcgcgtctaccgcgccccggagggttgggagcctgccgaagacaacgtcataccgatcaacccgtttggcgctattcgatagttaaaatcgatgtaacttttggttgacatgggggatagcatgtgggattctagtcccacaccgtcgagacacccacatgttcgatccgatcttgatccccgtagctttcggcgctatcgccctggtccttatcgtcctcggcttcgtgctgtccttcgtggcgccgaatgccgaccgcacgatcactgcgatgacctgcggcgcaaccgctagcgtcgccctgtcgctgctggcactggtcggctgcgcgttcaccctgtaacccacagaggatttgcccacaatgaatgcattcacgcaagaaccgatgtggaccgtcgaacaggcggcccagtggctccccggcgtcacgctcgaccgtggcacgctgtccaggctaggcaaggactgcagcctggtcgtcaggatctggaagcgtccgactggcgtggtgccggtcgtcggcaaagcctggtcatccgagaagtcgtacacccgcgatgtgctgatcgaggctttcagtcgtcaccccgcgacgcgtgccgcgatggtcggggtgcagtcgcgaaacgccgaccggcactggcggtcctaatgcgcgccagaatctcccatatgcgctccaagtacggccggtacgtgatttgcgtctcacaacgtggcgctaccgcgcacgccctgtacgggcacccgggcgggacgccgatcggcatctacgaccgtacggtgccgatcgatactgtgatgcgcgacatcgaaaacgcgcttgcagaagtaaaccgtaagtgacatactaagcccacacccacgacgagacagccacatggcacagctttctttcaataacgatccggcactcaaggcactacacgttgctcaggctgagcggcacgaagcacaggacatgctggtctctggcacgtttggcgagatgcacgacggccaattccgcggctgctcggtcggctgcttcgctcacgagatcgacccggatagcactagctttcacgcaaccgtggcggatgcgcgcgccctgccggaatggttgatccgcctgcaggactcgatgttcgagggcttgccggcagctgagcgtggcagcttccacgtcgagcttgcaaagcgcatcccggtcggcgtggacctggccccgctgccgcatctcatcgccattgcgcgaatcgacaggatgctggtgacgcagcgcgccgccttgttggccgatcatcccgaccaagttactcacgcaattgcacaggtcgtctccgccctcgaggttggccgccgattccacgaaggcgctgcaggtgtggatggcgtcgagtcggcggcgcagtcggcgcagtcggcggcgcagtcggcagcacggtcggcgtggtcggcggcggagtcggcggcacggtcggcctggtcggtggcgcggtcggcgcaggcggcgatggcgcagtcggcgcagtcggcggcggagtcggcagcgtggtcggcgacggagtcggcggcgcagtcggcgcgctcggcggcgcgctcggcgcgctcggcggcggagtcggcctggtcggcggcctggtcggcctggtcggcggcacggtcggcctggtcggcggcggagtcggcacagtcggcggcggagtcggcgacggagtcggcggcggagtcggcggcggagtcggtgacggcggaggcgtggtcggctgcgcggtcggcacagtcggcggcggcacagtcggcgcgggcggcggcggagtcggcggcgtggatcgaagaacgcgctgcgttgttttccagcctgtcgaagctgggggcttgagccatgtctaccgcttccgacatcctgcgccagtccgcgcagactatcgacgaccgcgccgcagagcgcgaccagccgggcggcgaacgctcgatggcgcgcaccgtcgccgcgttcaacgcgctgtctgggtatgccctaaccgagcgcgacggctggctgttcatgaccgtactgaaacaagcccgggcgttcgccacgtcggccggcaagctcgacgactacgtcgacctatcagcatatgctgcgttggcgggggagtgcgtagcgtgtgtggaggtggcgcccgggattctggttctcgatggtaagcccgtcgatgtgccggattgggcgcagtgggctgcacaagacgcagatggtcgctggtatctattcgagtcgcgacctgtgtctggttccagtatctggctgagcgtgcgaggcaaagcgtggtcgccgtttagggcttcactgtgtgcacctaattggctagacaccctaatcgaaatcaaggataagccatgaacacctcgatccccaatccgtacggcgtccgcgcaccacgcggcccgcaggcccgtcggcgccacccgcacccgggccgactggccggtgcgatgctggcgaccggcctaacgattacaatcctcgtgacgatcgctctgcgcaccgtcgcccgcatcctcgacatggtgtcctgatgaaactcaagtcccgttggtacgcggcactggccgcgctgttgctcggttcgggcgcaaacgcacagaccgtcagcccgttgggttggcatgcgatcggccaaggcgtgcaggtgcaagcctcgacgattcgccaggccgacagtcagatcctcgcctggacccggcaccagaatgcgttgggtgagtgggcgcccggccggtacgtgttcgactgccagaattggcgcttcctactggtgcaggtagaacggttcggcgaagcggtggacgtcgaggccgactggttgcccgctagcgcggggacgaatgcggactacacgatgggccgactgtgcggcgcttacggaatggcgggtgcgcgatgagcgccgctaagttctgggtagagccggtgtgtcacgagtgcgcccgggccgggcccggtgaattcgtgcgcgcagggcgcatcccggtgcgtggcatgacagaagatgcgcgcagagccgggtttagacttcgcaccgatggcgagttcgagtgtcgtgggtgtacagaccgcatgttggcgaaaatactggatcgaccatgagcgaccatatccacgacgaccgggcagcgatagttttgccattccagaccctcgaagccctgcggcggatactggatttcgccaagactttgccgccaaggggcatcgtcgacgcaggtttgctcgcctttcgttatttggacccgaagctatgagccctatcccaatccgcgccatcatctacaccgtcctcgtagccgcggtcctgggcggcctgtactggctgtacgccaagggggcacgggacgcgaccaccgaagccgacctgcaggtcaccaaagaagcggtggcctaccaggccgaggcgatcaccatcggctacgacattcgcatgcgcgtcgacgccgagaccaccgacacccggacccaactgaccaatgcccaacaggaaatcgcccatgttaagactgatcctgctactactgacgctgagcgtttccagcggatgcgcgacgtcgcgctccgtgcctgggaagcaagccgcgcaagcgcgtgtgctgtgcgaacagcggaccgccgcgattgcgctggatccgccgcccgtgtcgactgacctatccgactgggtcggcgcctacacccaggcggcttacgcgatcgtcgatcgcgacaacaagcgtgccgctacggcggactgtatcgatcgactcggggcggtcaaatgaccgccaccaagccgaagtctagtcacccttggcgcgcgttcaatcccggcgcgcttgcccgggtgatcaagccgatctatgccgagcggcaagcctgcccgcgcaccggctacatgaagaaagtcaagcgttaatcaccacagcccacaggacataccaccatggacattcagtataccgacgagcagaaagcccgcatccgggcgatgatccaacttttcgaggacgcaaaagtatacctacccgccgctattcaccgcggggtcggtatttgtagcgcccttggtgcggcgagtgaagtgcgctacggggcgcgtttttcccgtgcacggaacgattgttgcaatctaatcggccgcgcgctgggtggccctgctatgtttttgggccagtggcagcgccgaaagggctttcgggcgaatgcgtcgatggcggctcgcgcagcttggctcgaacagctgatccgcgactgcaaggcggccctgtgatggatatcgccaagagggatggcgtgcgacagcttgcgccacgcgtttgtgtggcgaccgacaccgcaaggtcatgcgtattgggtgcgtcgcattcgcgcccacgcgacgccggccaccccgtgttattgactgactccatatgacccggtaacatccgggtcatgttcgtttaaccttagaccccacgcccatgccctcacagacaagaaagacgccccgttggtaccaggacgaggcggcgaatgctgttgtcgccgctctgcaagctgcgcgtaacgtgcaccccatcgcggcgatcgtcaccggcggcggcaagtcgctggtcgccgcgatgctggctgaaaaactgatagccacccagcccagcgcgcgtgtgatgatcctggccccgtcgcaagagctggtcgggcagaaccgcgacgaagcgtcgtcatacctgtctgcaaccctcgtgtcgggcatcggcgtatactgcgccgcgctcaaccgtaaggatcgtcagcgcaagatcacgttcggcacgcaacagtcggtgtggcgtcagatccgccggttcgggccgatcgactacatcattgtcgacgaggcgcacggcttcgacctgtcgttgccgtcgattcgcaaactggtcgaaggtgcgcgcgagcaaaacccgcacgttcggttcattgcgctgaccgcaacgccgttccgtcagaaaggcgtgaagacggtgccgctgtcgcagtgcggattgttcaatgccaaggtatacgacctgacgaccgggcggctgttcaatcgcttggtgcgcgagggctacatcgcaccgatcgtcgcaccgacggtgcgcttcccgcagatcgacgtcgcgggggtcaagacctcgggcgaggatttcgacgagaagcagctggctgctgctgcgatgaaagtcaccgccgaggtgattgccgtcggtctggaaaacttggtcggccgcgaccacgtgatgtggttcggcgtcaacgtcgaacatgcgcgcatgatgcgcgccgcgctcctggctgccggcgagacggtgacgctgatttacggcgatctcgacaagggcgaacgtgtcgagggtatccgcgaatacctggccaaggaaacgcggcacatcgtgtcggtgggcacgctgacgaccgggtttaatgccccgttcgtcgacgcgatcgtgatcgtccgcgccacccgctcgcaggtgttgttccgtcagatcgtcgggcgcggctttcgcccgtatgccggcaaagagaactgcttggtgctggacgccggcggcaacttcgaccggctcggcccgatcaatgcggatctcgaacagggtgactcacgggccggcttgtgggagtgcagcgccgagcgcgtggaggcaccagggattgcggtccagcgcgagcgcagcggcatccgtttcccaacacccagccccgacatcgaggaacgcgacttgcgcgtcgtgctggggctgatggactccgacgagcctgggtgcggctacctaaacgaccccgagcacatgacgtgccgaaactgcaaccgtccgcgccaggggttcgtcacccagtcgcgcaagcccgaaccgcaagacccgcactccggcatcggagacagctacgacctgcacgacgaggattcgatcatcctgcgcgacgagctgtgcgtggagacccgcagtgttccggtggaccattcctactcggtgcctgagggcgaaagcatcctcacattccactacgagacggcggttggcacctaccagctgcgtctggacttcgaccggcgcaccgccgataaccgcttcttcgcccaggcccggaaatacttcgaggtatcgacgggccgtgatctgccgaaggagccgcaccgcgtgttgctgcagcgcgacctgatcccgcaaccgacggagatcacgttcaccaagttcgaggatggacttgtttggctcactcacgtacgatttgtgcgtgacggacaaatggcgactttccaatatgatccggcttacaaataggatttagggcccacatgaactacctcaacgaatacgacctgaaagccgcagcgtggttagccgagttgcgagacgaaggattgatcccaccgtgcgagattgacacccgcagtatcgaggacgtaaccccaaatgacctacgcggatacacacaatgccacttcttcgccggcatcggcggatggccactcgccctccagctcgccgggtggcccgcagaccgaagagtctggactggcagctgcccttgccagcctttcagcgcggcaggcaaaggagctgggtttgctgacgagcggcacctctggcccgcattccactggctcattgaacagtgccgccctccaagcgtttttggcgagcaggttgcaagcctcgacggcctcaactggctcgaccttgtatgcgctgacctggaaggtgcggcctacgccgttggggcggccgatctgtgcgctgcgggcgtcggcgcgccgcacatccgccagcgactctactgggtggcccacgccaacggcggcgctggccgacaagggcgtgcggacattcgagggcgggttgcaggaagcgatgcgcaatcacgggccggacttggcagcggctgcgtgtctggcgggctggccgacagcggcggcgcgcgagtggaaggacgggtcccgatgcgacaacgtacccacgaatgcgctgttgggaagagtggcttggctagcgcaaccgatccgctacacggcttctggacaggtgctgattggctcggatgcagggatggaaagcgcaggccagttgaacccggatcattcccgctggctcatggggtacccacccgcgtggcagcgctgcgtggttacggcaatgcaatcgttcccgaagtcgcggcgcaattcatccgcgcagtgatgtaacatctgcgctacccacacaacgagaagcccacatgacccctaacaccgacactctgttcctcgacttcgaggctgcatcgctgtgcgacttgaagcgccacggcttggcacgctacctacgcgatccgtcgacccgtgcgtactgcttcacgttcgttctgcccggcatgcgcaccgccgacctgtgggagtacggtaagcccgtgccacgccaagtcaaccagcacatcgaagcgcgtaagcgcttcgtcgcgcataacgccgggttcgatctgggcatgtggaacgggccgcacgcacgagctctccgtgcgtctggccaggaagtgccgatgctggacgtgcgccaggtgcagtgcagtgcagcgcgcgcccgatacaacggcttgccgggctcgctggagcgcgcgtgcgcagccctcggcctagcggtgcagaaagacaccgagggggccaagtggatgaaagagttgatggtgcacccggagtggacgcccgtcacgcatccggagcactttcggcatacctacaagtacgcgttgaccgacacgaacgcgatggtcgcgctgtgggaggcgacggtgccaatgcccgacctcgagcagcaattctggcaactcgactacgaggtcaacgaccgcggcttcggctgcgacgtggccggcgccgagggtatggagcgtatgcgcgagttggccgaggcgctgatcgactacgagttgaccgccgccactgacggtaagctgctatcggccagcgaggtgcaaaagatccgcgcgttcgcgtcgacgctgggcgaggacatggacgacgccgggcgcgagacggtcaaggggctgttgagccgcgacacgctgccgccggcgctgcgcgacgtgctcgcgctgcgtctggacgcgagccgggcaccgaagaagtcgggcgcgatcctgcgcgcgcacgtcgatggccgcatgatgcacagcacggtctaccacggcgcactgtccggccgatctacggcgatgggctgcggtgacgctcagcttctcaacgtggcgcggccccgcccgggccgcaaagccgaagcgtgcgaagcgtatctcgccgccgcaacgcgtgacgacttcgatttcctgtcgcagccggaggtcgggccgccgctagccgctatggcggacgcgcagcgcccgctgttctgcgcgacctaccccgagcacacgttggtgtgcgccgaccttgcgggcatcgaggcgcgcttgggaccgtggtgcgcagatgacgaggagatgctagtcgagttcgaggagggcatcgacggctacgtggtcgaagcgagcggcgtgttcgaagtgcctgtcgaaaacgtggataaggatcagcgccagatcggcaaggtcgttcgcctgtcgctgcagtacggtggcggcgacggtgcgctcgacaacatggcgcgcaactacggcaagtacctggaagacgacctgcgtaagaaactcgtctggaagtaccgcgagaaccactccaagatggccatctggtgggccgccctcgagtacgcggtgctgatcgcactagatcaacccggccgacaggtccgcatgccgatcgggcgcggcatgtgctcggaggtgacgttcgtcaaggactccgcggcgttgcgcatgatcctgccctcgggtcgcgcgatcagctaccacaatgcgcgtatcgtgctggaaccgggcgcttctgcaccgctcgccgtctacgacaagcccgaaggcttcgtcgagacgctagaccgcaagatcctgtcgaacaacatggtccagggcctagcgcgcgatctgttctggcaggcgatgctcgacatcgcgccggctgagaagatcgtccaccacgtctacgacgaagtgatcctcgaagtgccgcgcgaccgggccgaggtgcgcttgggccagttgctcgcgcggctgcgcgtcgcgccgcggtgggcgccgggcctgccgctggacgctgcgggattcgtttcggatcggtggcgaaaggattgacaagccgtaacttgtgcgttacgtttgattcaccacaaccacggagacatccacatgctaatggtacgcgtagaggtctacaacgccgacgactcgctgttccgcgagtacgtcatggactttgatttgccgttgcagcgccacgtgctggagcgccagacgcggtgcgcgatggaagccaaccagatgatctgcacttacccggaggagccgtgatgctctgcaaacccctcgatgcaccgctcgcttcgttgcatcccgacactccggtgttcgtggtgcgctacggcctggtgtacgtgtaccccgccgacttgttgctcgacatcgcgaacgaccggtacgtgccggtcgatctagccccgtgggactggcgtcatcacgatgtaagcgcgttatacatcgcttggcaacttggggcggccctcgacgctcgaagtggccgtaagtttgacatctggtacgaatcgcttcgcgagggtgactcgcgacgatgtgcaggtgctgcatatgtcgcggcaaacaaactaatcaacttcgagacgtttcgccatcgacacttgccggacggcggctaccaccgcaacactacggcgggttgactattagcgcaccagcgcgtaacgtatcgcaaaccgcaacgagactgaccaaatggctgcccccgaaacaacgtgtgacccgtccgactatttcaccaagccgatcgaagcttggaccctgcgcgagctgaccgatgcgatcggcatgcacgctaacaccgcgcgcctgctcggcatttccgaggagcaggtgcgcaccatgcgctaccgacgtgtcaccagccgcgagcgcatgcaggtgctgcaggacgaggtacggcgcgacgaggcgaagtaccgcggccagctggtcaccgaatacaccacccgatcactgcgccggccgcgccgcaaacccacaaccacggagtaacccatggaactgaacttcaagtcgatcgatgagctcgcggagttcgtcgctattctcaaccccgcgtttttgcaggtcggtccgcgagtcgtcatcaatgacttgaagatcgagcgtgtcgacgtgcccgacgaagaccgcatcctggagcctggcgacggcgacggcctgccgaccgatatcgacccgccggaggcgccggtcgaggagaaacccaagcgcccgcgccgtaccaaggcgcagatcgaagccgacaacgcaaaggctaacgagcctggtgcagaacccgaagttccggaaacgaccgagacgcacacgctgccggtcgacgaacccgatgccgcatcgccggctgtgcccggtctggacgacgaagcgctcgggctgctgatcgccgcggcgactgacgctgcaccggcgaccgacgccgcgttgctgccgctgttgagtatcgcacgcgatttcatctcggcccatagcgtcgcgacgatcgacgcgatcaaggccgcagtcggcatcgctggcgtgccgatgcagaagctgcagccggaacagcgccagttgctgcgcgcctgcctggaactgttcggcaagtaacgtcctcgcagttccccagcacgtgcgctgtggtgtaagatgcgtccgcgcattgctcatcgggatagcgctacgggatagcgctacaagcacctcgccgggctggcccggatttgatgacacgtcgaataaacgtgttgtcgcagcgccgcaaggcgcagccagcacgtgactgaccgggagagcccagtcgcaacaaagcccgcgaaagcgggctttgttgtttcttgccttaccgcaccgagaatcaggtgcgcgcaaacgtcatccgaccgaagcggaactcgatcgcggccggctgcaggatgcgctggccactcggcgcccggaaggacgtcatgtagccattctgcaagccgtagcgcttgccgttggacggcagcgtcacggtcatgccgacatcgagccccgtgcggttggtctgctcgtactgccagatctgctcgaagatgatgagcgacggactgtcggcttgcagggtgagagtgaacgggatctcgttgtagacgaagccggccgagaacttgccgtcgatgcccatcgaggtctctttgttcacgaccgccgaggtctcgaacacgttgtccgcggcgtagcccgacagcagcaccgacgaggggtacaacgactcgacggtgatcgcgatcgaggaatttgcaacggtgagggtagcagccatgacgacgcctcttagagaacggtggtggaagagatgtcgattttctggatgctgccaccatcgcagtaccagaatttgacgaccggagagccacgttcggtgcgcacactggcgttcagcgggtcgctgacctgcaggtaccagccgaccgtcgacaactggtcgtcgatctgcaggcgcgcctgctggttgacctgcgcgcgctgggacggcgacagtgtcacaccttcgcggatgatgccggcggcggtcgcctgcaggatcgtggcctgtgcgccctggtagatcgcgttgtaaccatccgcgttgtagggcagcgagttgtacgccaacagggtttcgaacagcgcctgctgcagcgtacggcgcagccagatctggccgagataggtgtcggaccagtcgaacgcgccggacagggcgccgttgtagtagatgctgtagttgttggcgctgttggcgtagctaccgtagtaggtatagccgttggtcagcagcgcgttcgcggtggccaagttggtgaccgacggcgtcgcgcctgcgccgagctgacggaacgctagcgcgttgcgtccgtcgaccacgtcgtaggtcgtcgcgcccgcccatgccatcacgcctgctgcgtgcaccaggccgccgtacagcggcacggtgcccgtatacggagtgttgaacaccacgccgccgaagctggacgcgttgttggggacgatgctcgccgcttcggtgtcccagcccacgtagatgaactggttctgcccgttggcgctgttccacgccgccagtgcggtgcgctcggctagcgtcgctgcccaaatggtcgagaagatcgcccagttggtcgatagcacggtcgcgcggtccatcgcggtgccggccgtatcggcgggcagaccggtggcttgcagaaatgcacccgccgcagcggacagtccgacggcggaggcaagcgtgccggtgatcgccgacgtggtcgctgcagtaccggtcgcggtggtcgacaaaacgaaccggtcgcgcgcgttgtcgtaagtgatcgcgaagttcggcgtggtgaaaccggccgtcatgcgcgcggcagcatcggcaaacgacgtggcggccgcaaggttgattgcgctcgaggtgcgttgggtgtcggtcgtgacaatcagcgtaccggatagcgcctgcagctgcgccagggtcaggccggtcggtgcgccgataacctgggccgaggtcgcggcctgagcgtagcgcgcgaacgtcagagtcgccggcaactggccgccattgagaacgccggcgaagtagacctgcgcggcagtggactcgtcggagcctgcaccgaagaagccagtcacggcggcggcgctgtagaatggctgcagctggcccggcgccacggccgtagactgcgtcaggaacagaccgtcgagcgaggtctgcggcccgcccgcgctgacgaccgccgggttgacggttacgatttgcgaaatagggatatttgccacgggtcacgctctccggtcggatatgccaatcatagttgatcggcgacaatgatggaatccaaagtcgccacgtcgaaaaagtcttgcggcagcgtgacttgctggttgacctggccgaacagccggatcatgaaacgctgttcgaactggccttcgctgttgacaacgttaagctgctgtggtgcgtccgagtgcaggggcatcagcaccccagacggcatgttgtccacggcccacatcgtgcgccacgcagcgtgcagcactgacgcccaggtcggaccttcggggccgtaacagtccacctgatagctgtaagtctggtgcgcaccgacgatcgtcgcgttgccgtccggatcgtagccgcggcgtccaaaatcctgacgctgcatgatccccggggacacgaccacatagctaccggtcggcgtcgcgacaaggttctgaaaccccttgacgatctggtcggtgtcgtaggggaggcccagcaccttggaaatgaagtcgaacagcgccgcgaaggtctggtcttcgttcgggctaagtagcgcggcggccatcaggacacccccaaggtcggcaccgcgccgttggctaacgccttcgtcagcgcgtccaacgtcgcggcgttgacctgccgggtgatcgatacgctgcaccaatccccccaccactcaaggacatgctggacaacccaccattcggtgccgagtcgcaccaagtcgccgcccttaccgtcgggacgcacgatgccggcaaactgcccgtacgcgtagagcttctgcatgttgcctgcgaaggccaacccgccgaggtggtacagatcctcgtgcgacatcgcctgcacctgcagacgttgggccggcagcataccgaacgtcggtgtacggatgccgccggccgtcgtggcgccagtcgatatgtagacgtcacccggtacatcgggattgaccgtctggatagcgccacgcacgatcgcgtgtaggttcaggccgctcacgggcttggatcctcgccgtagtcgccgtcgcgcagcacaacagccgagtcaatagaattggtcaggtgaccggtaaaaatcaagccatgtgagaaacccttgaccgccgcccaatcctcggagttgtccgcgggccagtcgcggatcgtctgctgtaggtcttcggccatgcgtagtccaatcgtgcgcagggccgtgtcggtcgccgcgcccgccttgatcaactgggtcaaaccccgcgaccaggcgagattctgcgcggcgaatgtcgactgcacgaacgggcgcggatggttctgcccatgaccgtattcgagcgcctgagcgattgccgcaacgggcagcccgccgcgggcatcggcgacttgctggccggtacggtgatcggtgtatgtatcctgcgggtatgtcgcgccctcgagcacgcctgccttgacgctcgcgggcacgaactgctcgcgcatgtgcgaagggagcttgacacccgagcgccggacggtggtcatacgccgttgggcgtcccgctgttttcggacagcaactgcgcgccctcgggatacaggcgccgatcggcgaacgcgtgggcatagccctcgccggaatggccgatcgccacgtaacggaacgaccgaaacggggcgagcaacatccaagccattgcgccgtactgggtctggttccaccacgccgcgccagcagacgccggaatgttgaactcgaaggacgaggacaccgagccctcggtcgcgctggacaaccgaccgacaaccccggacgggttcgccccgccggtgccgacgacggtcgtaccgaactgcgcgagcaggtgcgcaacaaccagcgacaaaatcgcggagcgacgcgccacatccgcgatgaccgatgcatcggtgttgtcgatgacgccggtcgcagagaggaacaggatattcaagcgcgcatcagggaccgtcgcgaactctgggaacgcggctttgaatgctgcggggtcaaagacaacgacggccatgatgcgctactccgatcagttacgcttggcttcggccttgacggcgtcttcgatcttgcccggcagttcttccgggtccagcgcttcgaagccggtcttggtctggccgcgctcttgggtttccttgatcgcgtccttggccttggtggtcgcaaacacggcgccactggtgtaccacttggccttgctgtagtacgggtggttggcgatgtagtcccacgcttcggccggcacgccactggtcaggccgtgcgcttcgtactcttcgatcatcttgagcgcccagtcgtcgttgctgccgcggatcatcagcacaccgcccggcatgccgggaacattctcgaagcgcatgcccgcaggcaggcggcacgcgatggtgacggtgccagcgctgtcggacggttggttgctgtcgttgcggttgcgagccattgcaattgttcctgtaggtgtggtttacgcgtgcgatgatacacgaatacggcgcttgcattgcgtgtcgggtgcgattaaagttcacctcacgtatctggagtaagtatgtctcgcaagatcccacatgacgaatggttggtgcgtttccggcacactcacggcacccgctacgactaccccgcagaggtcatcgatgcgcgaacgccggtgcgcattgtgtgccgcgaacatggcgcattcatacagacgccggacaaacatcgcgctgggcaaggctgccccgactgcggccttcgggcccgcagtttgacgcagcgaaaaggcctcggcgcgttcatcgaaaaagctcgagtggtccacggcgaccgctacgactattcggccgtcgagtacgttcgggccgacgatcctgtatcgatagtttgtcgcacgcacggcccgttccggcaaacgccggcacaccacgcaaacggcggtcagggctgcccggcgtgtgcggctgccgagcgtggcctcgcacggcgcacggccgcggcggaggacttcatcgccagagcacgcgcagtgcacggcgctcgctacgactatgcgcagacgctgtacacgcacgcactgggtacggtgtcgatcatttgccccaagcacgggggcttcacgcagaaagcgggcgcacatgttgcgggttcgggctgcccggcgtgcggacgtgaaacttcggcaccggggttcttcacgcaggtcgactttgccgcgagggcgcgcgcagtgcatggcgaccgctacgactattcgatcgatgactactcgcgttcgaccgagcgagtgacaattcactgtcgcgagcacgggccgtttcagcaaattgcaaacaatcacttgatcggccacggctgcccgcgctgcggtaagtttggcccgtcaccatccgaacgtgatttgctggcattcgtgcaatcacttaaatcagacgcctacggttctgaccggaaactgattgcgccgaaggaactcgacatcgttgtgccctcggcgcgcatcgctattgaactgaacggggtgtactggcactccgaccggcgcagctcaaaaacggcggggcgcgataaacggacggctgtcgcggccgcgggctatcggttgctggctgttacctgcgccgaatggaaggaacgccgtccgcagtttgaacgattgatccggaacgcgttgggctgctcgcaagatgccaagctgcacgcgcgccagtgcgccattgtggagcctacgactgccgaaacaatcgcgttcctagacgcctaccatccgcagcagccggggcgggtctacacgcgccgattcgggctgcagcacccggtgcacggcctggtggcggtgatgacgtttaacttggacgcctattcgcgcaaccgcaccaagtcgggcgtgtgggacttgacgcggttcgcgacgagtgcacaagtacgtggaggtgcgtctaagctgtttaagcatgccgtcgccgttctttgcgcacagagcgtcgtcagctacagcgctcacgactggttcgcaggcggcgtgtatgaggcgctcgggttcaccgcgacaaaggaagtcgagccggattaccgggtgtatcaccggaagcttgggtttcgtccgaagtcggcctgggcacgcaagcacataccaacgcggctgttgcagatcggcagttctgcagcgttcgatcccgctaacgactcgcgcacagagtgggacatcgaggacgcggtaggggccttgcgggtgtgggatagcggcaagacactctggacgtggcgcaaaacaaaccccgcctaggcggggtttgttcctgcggtgttaccggactaagcgcctagtaactgtgtgacggcgaacggcaagtagatcaccgagccgtaggtgccggcgctgtgcttctggcgctggtaggtcgagtagcgctcgatggcgtgcgaacggtacttctcgctgtacgccacttcgccagacggctggccgttgacttccggtgcccacagctgaaccaggcgaccgccggcactgtcgtattccggcacggccacgtactcgatcagcgggtaggtctgcttgatcttggcgccggccgacaggccgaagctgttcgtgcggttgatgtcgttcagggccgacggcgcgagcgccatgacgagacgttcctgaccggtgatcagacccgccgactgcgcgatcagacggcccaccatcgcgaccacgtcgttcgcgatggcttccggctcggcggtcgcccagttgacggtcgcagcgaccggcgcggtcagcgtcgggtcgttcatcaggccgtagttcgggatgcccgccacgcccagcaggaacgagctgttctggaacttggccatcacggtcgaggaggcgatctcctgacgtgctgcccagtcgatgcccgcctcgcccatgatggcgagctgacgatcgccccactcggtccaggtctggtagatatagttctggcgcgacgggaagttcacgttcgcgttcgacatgccgttggcggaccagtcgctgtaggtcgcgacctgaccgaccggctcggcggtgatgaacacggcgtactgcgtggtccagtcgcctttcttgacgaccggcaggatcttctctgcggccatcggggcgagctgaatgtcgatcacgcggcggtcgacgtacatcgacatccacgccgggataccggcgctcgcgccggtgaccagcgtaggggccagactgatcgcgtcgttggcgtacgcggatgcttccttggagacctgtttgaccgtatcgggcaatacgatgccgacgcgggccaagtcattgatggtttgacgttcgttcacggtcactgttcctgtatgaggttgtcgatggtggccgcttacgcgccgttcttgccgatcatgacggtctgacctgcgacggccgtctcgctcagcaacttgaagccggtgtcgatcgtggaactcgacactgcggcgccgatgttgatggtgccggcagccggatcccagatgaccgcagcgccacgcaccggagtaccggtgatcgcgtctgccgtggcgaagaaatcgccgatcgcgaacagctcgaccgcttggccaggctggatggtcatggaagtttcaccgagccaggtggtgatcagcgccgcgcccatgtagcgatgcacgaagccgatgcgcgttgcggcgccagtcgccgatgcggccgcatagccgggggtgctcgacacggtgccggtcgccgacagcaaaccgaacttgccggccaacgcggggcccggcgaggccggggcgctgaccatgcgctgattcagcgtaccggacaccacgaactgccggggattgaccgaggcaaagtcgccaggtacgccaatcgccgggttgacagcaacagtagattgaaagggcatttcagtaactcccgaggattggtcttagcgaccgagattgcgaatacgcgaagtgtcgaaggctggcgcgccagaagcgctgtcgttggcacgcgacacggtgacatccaggcgcgagccacgcgtgaccgactggatcgcctggtaggtcgccatttcggcgcctgcgggaatcgccgacacgtctacgccgcgctgcttgagtgcctcgcgatagatgtcgttggcgttgtccatggcgatcatgtcgcccaggtccgggcggcaatcgcgcttggcctgctcgaccgccttggcgcgcgcgcgctccgacgtgacggcagcgtcgacaacggcctgcacggaagcggcgtccatcgcgactggcttgtcatccttatctttgtcgttgtccgggtcttcgtcgtgcgcggtgttgacgctggccggcacgccttcgacgggtttatccgcgtcggacggggcgcccttgattgcagcgacgtcggctttcagcgcttcgagctgttcggtcagcagcatgagggcttgcgccaactcggcattgccggccgccggtgcgggagtgttttcgatcggatccacgtttggtgctccagtttgggaagagagcgcgctatcagcgacgtgcgcaccggttgcgcgcccgtcttcgacgagcgccacatgattgccgtcgattgccatcattcgcccgtcgtaacgacggccgttgacttcgccgggtgtcatttcgggtttgtagcgataggaacacgacagatcggccagcatgccggactggacgaactcgatcgccttgccgtccgcgatcatcagatcgccgcgcaagtgcggcggctcgaaccggacgttgtagacgctgccggcggtgtgctctttgcgcggctcgtcggccgtctgggcgatatgccggatcatcaacggcaagccgttgaacgagtcggcggcgagcgcgagcgcgtccggatcacgatacatctcgtacacggtgtccggcttgagtccgagttctttccacccggggatctcacggccgtagtacgggttgatatccgcgtcggacagcacacagtcgcgcacgcgcatacgcccgtcggcatcgaacgaccgggccgacttcttatcgaacgcgtaactagcggttgcaacaggcatgcgcgcgatgatagctgtgtggcataaacgtgcaagcgttgttgttgacaagcacaaaaggtcacgctaaagtgactcccaccacaaccgcaggaactaacaacatgaacgaccaagcagaagcgaaagccggcggtgcgccacagtggactcccggcccgtggactgtgaagttcagggatggctgcaccgacggcgtgcacaccgtgttctacatcgttgctcctgacgggcacacgattgcggacggccaatccatggaacatctgggcggagaaggcatcttggaggctcagtgccgcgccaatgcgcaggtaatggtcacggcgcccgagttgtacgacgcactcgaatttcttgccacactgcgtagggcgctcgagccgtctgacgccgtaatggcgctcgaggtgctagccaaagcccggggtgaggtgcagtcgtgagcccaagcgaacttgcttacaagtggtatgcaacgcacgacgacgaagaaacgctgcacgtgtgcgcggatgccggcgtacggcgctggcgcaaaggttgtgtcgaagtgctattgcttctcgcgcgagccggcgctaacgcgtcttcggcttccgagtaaacgccccagggaagcccggaacggctagcaagtcgtccgggccgaggtcttcgtcgatcgccgggatgatgctgcgcgacccgcaccggcagttgatcgccatcgatggcagcacgaagccgaactgatccccgaaatcgatgcctacctgcgtgtcgaatatccagagctctttgctggcgcggatatgcccggggcgtggatccttgtcgaccgtgctgtgcttccagtacgcgtaacgcacgcccagctctcgctggcgcgcgctgttcatctgcgcggtgagcttgttcgactggtcgcgcgcgatgagggccgcgcgcttgaccgtggtttttccggtgtcgcgcagctcactagcgatcgcttccagatcccgaccggcgaggaacccccgagacacgtcgccttgtatcttggtgaagtattgctccgggatcgaccggatcagcgcgacgttgtcgttgaccttgacatccagaatggtgcgctgtgcggccgacagttgcagcgggatgtcgaatccctctttgcggacgcgaccttgccacgccgtcttgtttgcttggtacgccgcgttgaccacgtcgaccgccaagtgcttggcgacatccttgaagtacgtctcccagcgagtgcgcagggcttccagttctttgaacagcgcgcgctgcacgtcgaatggcgttttggacgtggcgtcctgggcggcctcgggatccgggatgttcccggtgtcctgattggcaaccaacgctgcgcggtatttggcaagcgcccaatactcgacgcttttggccatcgcctcgacggcgcgctgcaacgccttgcggtactgctgttcagctgcgctcgacggcccgatcaccgccagttgcttctgcttgcgcgtcgggttggtcagcatcgggctcatcgattggggcctgcggttgtggggtcgtcgcttcagcgaggattgattcagccaagtcgtgcacttcgtccagcgcgtcgcggtcggccagtatgccggcgtacccggaattcgggtcttgtgccaagcgctgagcgaccatgtcgccactgacgatctgcgcctcgaggtaggtctgatcggtgcgtgcattcttctcgcgaacgtcggccagctccaagtcggtcagctcgtacaacgggttccagtcccatgacaagccgggatcgatctcgccgaactcggagagctgcacgatatccagaatccactccatgagcgggcctgtgttgtgcacctggtagcccgcgacgaagtcgtaccacacccttatctcgccgtcgctattggcgttcaggcccgccggcgtgatgccggtcagcttgacgagcggtatgtgcgatacggcggccatctgctcttgcgactgcgcctgcagcgcatccagacccgatagcggggtgttgatctgcgcgaagtcctcggtcgtcatgtcgaccgcaccgacgttgcggttgtcgcggttgaggttgaacagggtcaagcggtcctgcaacgactgggcgccgcccggagccaacagctgcgccatgtccattttcaggtacgtgatgctgaactgcttgaccgtatcgctgaccgactggcgagtgcgcaaccagttgtcgacgtagggcatcgccagctgtgagaccgacacgccgcggaacgaatacgcggccttgagcatgtcgcctaccggtcggctgatcatggtgaatagccgggtggtgtgcacgatcgtcgacagcatgtaccagctggacggcttgtaaaaattcggcttcgtcgggtcagtcgcgttgtaggcgttgggagtgagccacatcggctccacgcacgagaacgcctgcaagcacccctttgtcacgaacgcaggggtgagcagtagcggagagtcggcaggaacgtccacgctaccggagcgcagatgcgggaacacgtgtgcgccgccgtatgcctggtcgtggattactgcggtacggataagcgatcggacgttcagctgctcgagcttctgtgtgatctgcgtgattttgtctgccgcagcggcatccttggacgtgctgaccactttgccccacgtccgcacgacctcgtcggcgagcgtctcgtgcatggtgcggtattccggcagctgggccagcagcgacaaggtctggaagcccggccagcccgtcgcagagacgaacgacagcgcgtcggtcgcattgccgcggctgaagccgtagtccatcgcgtgtacggccttggccgcttgctgctcgcgcgcgctgtagcgctcggtgtcgacgggttctgcggttgccagagatagcgaggtctgcgtcgcacgtgccgggtcgcccgccgcggcgcgcgccaggtcgacgggcgatatggcgagccgccgcggttgcggtgcgggcttgggagtcgagcggcgggtcatctagcgggctccggccatgcgaagaatatcagcggtgatcatggaagcgatcgggttacgcaagcataactgatgcagggcgatcgtcataccgtcgacagcatcatcattccggcaatcagggaacgccgtaatttctgcgaccacgggtttgatcaatgggttgtcgtccgccgagggcaacatcaccatgccgttctcccagacccaagatacggcatgggcgcgcgcttccttgctgccgagcgggggcacgccgacgatgccgaccacgtgcttcgacaacatgtcgatcagtgccgggccgttcgcggcgtcctcaataaatatcttgctgacgcccgcattcgcttgcttgagcgcgacgatcgcctcggcggtgcgcgtgaacgacagcttttcgcgccgaaagtcgatgagccagattttctcgtcggctgtctttccccacacgccagcaaacacgtagtcgctgccttttttgtccttgaacgtagcgtcgactgacatgactttttggacgaaatgggtcggtaagtcctgccggcggtaataccgcacgccggcctgtccgaagatcgtgcccaggtccgcaagtggggcttgctggaacatcgcagcaaaccacatcgtcgacatggtggcctgaatttccagcagcttcgcaaggctgtgcagctccggcacgagcgggccttcgggttggtcggggttatatccgatctggtccggctggtttagggccacgaattgcagtcggcgatagcccggcttaccaacgtgcttgttgtggacgcgcgccatgatgtcatgcgccgaccacggcgtgccaatgttgacttggccgctgcgctcttgcagacgggtagacagcaccgagtcgtaccagtcttctagcccgtcttgcacggtcgagctaagcgcttcttgggcgtctttggtcaggtcatcgttgatggcgcagttgtgcgccaagatgccattcgcaaaaaggcacgcatgcgcttggacctgaacgtcaaagacccgaacggggccgtcaacgacctcaacacttcggactcggtcgctctctgctcgggcgtcaactgcgcgcgatggtggtgcatgtgacacgcgcgacacaaggtcagtaaattggaccacgcattgttcgtcggattgtggtcgacgtgatgcacctccaatcgatccgtcaggccgcacaactggcacatatgacgatcgcgcgttagtgtcgccaagcgtgcgtagcgaaacgtgtggcgctcgtgcggcttggttcgcgcaagccgcttggcttgctcgccgcgccagttcggattcgcctcgcccagcatacgatcggcgtgcgcaccattcgcgcacgacttgctgcagaacgattggaagccagcgcgccaggccgacacaaacgcggccccacaacgcaggcactgcgtccgccggcgcgcctcggcggctagtgttgcctgttggagataggcgccccgacagagcttgcaacgatcgcgaccataggctccggtaggattcccgcagtccgggcacgtcggccacgcgttgcccactgcccttgcgcatttcttgctgcaaaacagcagtccgctctgcgacctctttgcctgcttctcgaagtccgcggcggcacacgtcaccagcttcgggcaccgcgcacagcaatacgtcaccggcggcaagttcagacgccggccgccaagttccggcgcagtagatcggatggtttcccgtaacctccagaattcggccggactcagtggtgatccggtaaagccgagccgcttgacgatgggcgatagccttgatgcctgcatagcgaagttcgttgccgtcgtggcataggactttaacggttttagcgtgcaaatgcaattgatcgatgcgaatcgggcctgcgtccgtggagacgagcgtgtccggggcaaaacagtcgatcgagaagccggtcagcgagccgcccgcgccttgggctttaacaaagccgtaggcatggtcgaactcgtccgccgtgttcttgcctttgaacccgatcagggacgctgccgggaaaatctcccgatagatcggctcaagcatgatcgtcttgacgtcgcgggcgttggccttggcgcgcgacagcgcgtaggacgacaacgcgatgcggcactgcccaagcacggggccgaggcgcgcaatcaaataggcgggcagacaccgcgaaataagcgagctcttaccatgctgcgggggcgccgtcaggttgagcacgggccgccgccccgcgatcacgtcttctacgaacgcatccacctcgcggcaggtggtcaacgaaaaatagctgtgccgaaaccgcggtcgatgcaccgccgagacgaacgccgcgaaattggtgcgcgctgcgaggatcaaggccagcacgggatctgggacgagttgcgcgttcacagggcgccggcctgagccagttcacgcacttgatccacgatctgcgcgcgctgctcgtctgacagcgcgtcggcgaaggccacggcgccggccacctcgagcactgctttgtcgaagcccaggatcttggtcagctgggcgaaagccgccgacttaggccgaaacttcggaacgaactggccctgcttgtactcccactgctcgatgtggcggcccacctcgggtgttttgatggcgtccatgtccagcacgaacgcctcgatcgcaccaacgccaccgcacgaagggcacgtcacgtcctgaccgacctcgctgtcaccgaccgtgcccaggcccttgcatgtcggacacccgaccgcagacgccttgaccacttgggccaagttgagattcagcaagccgaccaagtccgcgatcaacgacaccttgatcggggcgagttctgtatggggcgtggggtcggacatgtgcggagtgtatcgcatctggaccgaaacgcgtctccccgcaccacatgaaccaaaagtacacgacgcagaggaacagacgcaaagtaccaacaaacctctctatatctaaaacgtgaaatcaaaagaattatatcgacttaaatttcctttttttcattggcattaaatatagagaattaagagctttatcctctggcatctagtacgtttggttcactattgcgtgaatagttgactttgggttgacatctgccctgtggatatgtagggtagcgactgcaccttacaacccaggaaaccacatgaccttcgactttcccgcaccgtccgacctacccgagggcgcacgactggtcgtgccggacccgtcacggcccatcctcaccatgtccaaccgtttccgttggtccaagtgcgcgctgtccgccgtgctgcctcggatccgcacgcagtctggccccgctgcgcaggagggcaccgaggcgcacaaagtggccgaggcgcgcgtattggacgcattcgccccgtcgacgcaacgctcgacagcgccggtgcagccgccggccggactcgaaggtttcgattactcggcggagggcgtcgcgcgctgggtggcgcaagtcgacgcgcacgccgaccagtacgccgcgcacgcgcagtcgttgttttcggattgtgcgaccgcgtcgtccgccgtgccggaatttcggttcaccgcgcacatccacggggtcgaattgcgcaccgtggcggacgtgatgctttggaacggcgtcgcgcgccgcctggtcgtgggcgactacaagtacggcgggtcaccggtaggctgcggtacgttagacgagccgaacgagcaggtggccggggcactcgcagtgctgacgtccgactggctcggcaccgacaagatcgacccgacgcacgctggcgcattcgtctatcagccgcgcattcgcttcggcgagccgttccaggtgctggcgccgcttacccctgagtggctggccacagagcgcgccaagctcgacgccgaggtgcaggcggtggcccgggcggccagcagcccgggcggcacgcccccggcacctggcgaacactgcaagtactgcccgtcggcccgctggtgcccggccgcgtccgagtacggcacggtcgcattggacgtagagtcgggcaggcgggccgtggtcgacctgtcgcccgaagaggtgatgcacctgtggggcgcacgcagcgcgttcaagcaattcgaagacgacctgcgcgagcgcgtcaagatgctcgccgaagcgggagacccagtcgtcaagacgacccggcgcaagggcgccgagatgtgggtagatcccgaggtggtcatcgaacaactgctcatccacgagcgctacgacctgctggtgccgcccagcataggcaagatgcgcgagaccgctatcccgaccgaagccatcaccgcggcgattggacgcgctcccgacgtcctcatccactcgccggccgggggcaagaacctgagcggtgcgcgcgacgcgttcgcaaagtaccttggaaaggcggagaacaactgatggctttaaccctcgatcaaatccaacccggaatcgtggcttatctcgacactgccgtgctcttcgcagattcccgggttcgacgcatcaaccccggtgagtttcgctcggggcctttcctgtgtgtggacataagtccgggcgaaacagtttggctcgtaatgaccggaaccagcgtctgcgggcggaaattccaaattaagcccagttggtggctacaaaaacacactaagccgcagtttctgaacaacgcaggacagccgctgcgtgggcgtgatgtagcattcgtagacgccagtcatgttgaccggatgcggcgtcgcccccaattgactgccgaaggtctggcagcggtgcgcgcagagatgcgccgccgcagacccttcgaaactgcttgacatctcaccacatacgtaataccgttgtatcgcggttctgaactgggccgcttcctatcaacctgagacctgagacctgagatacctatgagcattccagaccacaccgccatcctgttgtattccgcactcgcggctcccgaaaagaacaagctcaaggcggacgatgccccgctggagtattacgccgtcgtcgcattcccgccggaagcgcaaagcgatctggtcagcgccatgactgcggtttccgaatcgggccagctcgccggccacgaactggcgcccaagttgaactcctcgatggccaagcccacgcccggcattccggacaactggctgatcgcccgcatgtcgtcgcaatacgctccggagctgtatctggattcgggcgaagcgctggccgccacgccgctgaacaccacacgcatcaagaccgagtttttctcggggcaacacgtgcgtgtgaacgcaaatgcgttcagctggttccacaagaagaccaatcgccgcggcatctcgctcgggctgctcggtctcatgtcggtcggtggcggcgaacgtcgtgctggtggcaacgattcggccgaagcgtttggcgtacgccccggccaaacgcccgcagcgcaacccgcagctccggcatcgcagcctgccgcagccgcagccgcagccgcgccggcgaacgccaatccgttcgcccagggtacggcggcccagtccgggaaccctttcgcggcccggtgagtaggtccaactcaccgctaatcgaattggacgatgaccaaattccttggtgaccatcaccgcccggctacgccgggcggtttcgcgaggagaccacgatggacatagtgctacccctacctccgtctctcaacagaatatggcgcgtctttggcggacgcatcattctgtcggccgccgcgcgcgcttggacgaaagctgcagccggcgctttgccagtgggtcgtgttactacccttgaggggcgcctcgccgttacgctatatgtgcacggacccgcttcgtatcgtaatcgcgcctacgatttggccaaccgcgaaaaactgttgtgcgacttgctcaccaaacaacgcgtgtggcgagacgatagccaaattgacgaactgcacattctacgagggccttgtagtgggtcggggtttgtgcgcgtggtgatcacagagctgtcatgctaactggcgtatatgccacagtcgcgcctaatggacggcgctatgtcggtagcatcggtgggcaatacgcgcacttgggcactttcacaaccattccagaagcgtccgaagctagcgcagcagcgcgcaccctccaccccaaaaggatcgaacccactatgacctccctggccgaactccacgtcgaatacgtctccaaggccgaacagctgcgcgacaatctgtcgaaagccgtcttgacccacaccggcaaggtgctggtgaacccgaccgtcgacgagctcgtcgatgcactccaccgcgaaggcagcgctgccggcgcatctgcggtggcatcgtactatggcgagctcgaacattatgccgagaacttcgcattcgacgcgctgccagcgcatcttcgccccaagtacgtggagtactgacatggacgatcgtaagcttgcgagcacgctgcagcaggccaaacagtacctagccgaaggcctggtggccgacggtgcaactgtacacccccggtcctcctcgacgtcgtacctattccacgtcgcgcagacgcgtgacacgctggggtcgcggcgcgcgctggcgcgctacgatgcggtagccggcgcggccatctacaagtacgtgacaaaacacggcacctcggggctgccgcacggagcgttgcagcggttattcgctaccgagggtggtgtgacggagcggctaaagcgtccgtcgcgctggcagcgcttccggagtatgatcgccgcattctggagccgcctgcgcggccgctgaggactgcatgactatgagcactgaaaccgtagcggagaaactgggtgctggcaagtacgccaagccgatcgaggatggttgcatctggcacggcatcgcatccccgctggagaaggcgcatctgattgcccaacttgcgcacgaatcggacgggttcgccaccgcggtcgaatacgcatccggcgcggcctacgagggccgcgccgacctcggcaatacgcagaaaggcgacggcacgcgcttcaagggtcgcggactgatccaatgcacgggtcgcagcaactatgcggcctattcggcgtggaagtacaacgacgatcggtgcgtcgagaatcccgagctattggcggagctcccggacgcggtcgaggctgcgttttggtattggacggtgcgcaggccggtatgccggacgcgcgcccaggccgacgacctcgaaggcgttacccgcgccatcaatggcggccttcggggtctagaagatcgccggacgaagttgtccaaagccaagcagttgtttggtattctctgaccgttcattttcgtagggggcttcgtggccgcaaccaacgcacttgctgcgcttgtcatcgcagccagcgcgacaacagctgcagcgccgaatgccccctgggtgcatctggacgtggggttgggcgtgccattcaacgtgctgatggccattgccttcggcgcgtttgtcggtgtgtggaacaagcgcgtggaacataaaggtaatctgcttggtgcttttgctgtatcgtttatcatgacgctcgtcgccgtggtaggagttcccgagtggacagggtacgtatggaacggagcgggctaccaggccgtcatgggcatggggctcgcactcacgcagcagtactgggccccggtggtgatcgaaatcgcgcttgcgcgcttgcgcgccaccaacaagggagcatcgcatgctgagtgaactgaacgtgctgcacacttacaccgccgcggtcacgccgcacgtgtggtcgctggtcgccattcctgcgctcgctggcatctggctgaccgcgctattcggtctcaacgctgtgcgatccccgacgctgcgcgaggcactgacctggcccggcgcgatcgacttcttccaagggctgtcgcacctgatcgtgacgtttatcagcttcatgatgctgatggccgccgcagttggcggcaacatctacacctggcgcggatccgcgctgatgtggggcatctggggcatgttcgtattcgcggggcattaccagccctggcgccgattcattcgccgggtggtgagcatggaacggctggagcgcaaataccgtggcaagccggcgccgtcgaacagcgagttgagcgagctgatcgccaggggtcgtcgcgccatcgctatgccgatgcgttcgcgcgccgatgagtgcatgcgcgtcatgccctacatcgtggtcgctttggagcgcgtggcggcccggcagctcgaaatcgcgacgattcgcgccgaactgcagagcgccctgctggacctacggaccgccgcggcacgtgacgagccgacgggcaagcacgtattgcgcatcaactcactactcgatcgacttgaaggagcgatgcagcatggatgagcaacaccagaacgaacaacgcgaacagctcatcacgcgcgtcgacgacctgctgacccggcagtttggaagtcagaacggcgggcatgcgacgatcaacggccaggggccgtcgacggcgatgtgggtcgtggtggtcatcgccgcgctgttcttcggctggaacatcgccaatggcggccgacaaaccgaagccgcagtgcgccaagccgcgctggagcgcaaagtcgatcggctccaagatcacctgaccgcgatatacgcgctggcccccgcgctcaaacccgagcagctaaacgagaagaagccgtgagcacgattatcatcctgaccccgccgatccgtccgcgacgcgtcgccgccaccgcaactggtgcagcgatccttgaccacaaggacgccaccttggcgcagttctcctcggtggctgacgcgcaagcgtacttgcaatcgattgaagccttggagtcgcaggccgacaccgagtaaacaagaaacccgcctttcggcgggtttctctttggtcaggcgtactcgtacaccaggcatagacctgccgcgccggcgccgccttgaatgatcgtcaccgcgccggatgccgccgtagtgccggagcccccgcacccggtgtttgcttttgcactcgcacccgcagtcgtgtttgccgtttttgccgtcccgccaaaatacgtaggacctcccataccggccgtcaggtaagcaccggcaccgagcgaggttgcggcacctccagacgcgcccgaagaggcaaccagagcaacggcgccggcacccacggtcgctgtatccccgccggagccaccttcgccgccaaaattaggaatgctggagtccgcaccgaacgtacgcccgccgccaccgccactgcaggccgcgtacgcgccgaagttggacgtacccccagccccaccttggccgtttgcgctggcgccgccggcgccaatcacaaccgagacgctgctaggtaccgtagtcagcatgaacttgacgaacgcaccgccgccgccgccgcaaccgaccgccgccgcggtgttggtggactgggcaccgccacccgcaccgccaccgcccacaatctctaccacgatgcgagcggtaccgggggtaggcgtgtacgtgccgctcgccgtaaagcgttgtacgttgagcagacggcccacagcttgatcgaaccgtatcgcttgggttgggcgtgtggcttgggcgatattcgggctgcccaacgtgcaattggtgccgtcacaaaataccggcgtacgctcgccgttttgttccactactgccgcagccccggtggcggtacgcactaccattgaaaatgcgccgctcgtcgtgttgatgaaatcccacgagtagatccaattcggaacgacgataaccaagttggatgtcagcgtgccgctcaccgtgatgcggcgcttgccggcttgcgccggcacgagtgtgacagtgccgccggtctgattggtcagcgcggtcgcgccgtagaacgcgcctggcacccagccggtgctgtcggcgtcagggttggcggtgttgttctcggcggtgctgacccaattgcccaggccatctgcagacggcagcaacgcgccctgggggtaaccgttgatcgccgcatccgcagcaaaggtcgcgtcatacggccaccggccaccgagcatcggccaccaagcgccccggctcatctggttgagtccgccgttcatgtcttctaactgcggaggcacgccgccggcctcgggcggctggccggtcagtggtggaaaacccgtgcgcaacgaagcgcgcgtggcgtcggccgtcgtcagcggcagctcgactttcgcggagtcgttgttggcaaaaggcacaaggaacttggttggccggccggtagattgcatggtaagtcgcctttacggattgttgtaaaacgggccttgattgaagcccgtcacgtattcaggattcgcaccagtgttcgcaccagcaaaaccgaacggcgcgtacgtgaggtttttgtacaggaaacgaacggttgtgcctgccggctgcggaaacaagcccgattcaatgatagaccgctctacggccgtcgggaagaactcgaagtggtagccgatgatcatcggctgattcggatcgtagccgacgtagcacttaccgcgatcgccaaacatcgcgcgcatgagcgcattgatcgatggacagtcgcaactggcgatgtttgacgccgccttcaccaagagcagcttgcggtaatacacgtcctctagcgcaaacgcagtagtcccgccagcggcaccattgaagaacggggcttgattgaacggctgccattgcgtgccgaccgcatcgttgatattgaaaccgaagttgttacccggtacttgttgaatctgcaagtaccgatcctggcctaagattcgcccccagacatccaagccatagcccgtcgcggtgctgatatcccacaggttgtagaggaaatcggcagtgaaccgcgacaggtcgcaccactcgtcgaagctcgccaacagtcccgaaatgatcgggctgttggcgtactgcttcatgacagtgcgcagatagtcggtcacgtcagaccgccacggcgttgacagtgaccgctagcggggtgcagacgggcaactgatcgatgcccatggtcaacgcagcgccgctggtgggagaagggctcgtaccaatgaaaatcgacacgggggtgatgccgcgtagcgccagtactgcggcgaagtattctgcggcgacgatctgaccgccgattcgggctcggtccactgtgatagagccgtccggagtcgcaaaccccgtcgtcagcgccgtggcgaccgcattctgcacgctctgcacgtaggtactcggcaatgtcgacagattggcgacgttcacggtgacgtagatcgtcacaggtgcggggcgcacgaagcgaatcagatacgtcgggtaaggctcggcatagaattccgaatcctcgatcagctgcgtgatcaatgtccccaaaccgggggcggtcggcaagccgcacccgcagtcgagtttggaatggattgcggcagcgatgtccgcgtctgcgcccccggcgacgctaatgcccaagctgtgtgccgggatcggatagttcgtcgcgccatacctgatcgggttgacgctaccgttgttgtagataaagacatcggtcacccccgtcacgttggcaatggcagcgcgcaccgcgctcgccgtgccgttgccgccgatgttgacggatgacgcacggcgctcctcgaacgattggcgtgactctacatccaaccccggcacgctccccgtcgcgttgctgatcgactcccaacctgtctgctgctggtagatcgtcaagtcattgacgccggccgcggggcctgcaccgatttgcactgcccggaacacaaccgtcgcggccccacccgtcccaaaagtcacggcctgggtcgatgcccataagctgccgtcactggaccgcgcctgcgctccgagtggtaacacttggccaactgtgccgcgtacggttgcttgcaccgtagcgtaggtcgcaggctgtcgcgtcaggaagtagatgcgccctagcgcatcttgccaggcgccagagctggtcatcggatcgacgttagcgaccagctccagcagctgcgcattgatggccgccaaaataaacgcttgggtttgctgcagctggccttgaggcgtggtcaactcggcgttgagtgctttccctgacagggcaaacgcgtggatccagtcggtttgcacccccgccagaatctccggctctgagggcaccgacaagccggttggcagaaactgtggcagggggacgtttgtgctcatcggtctatggtatcagcgtttcacgcgatcggcgtgccggtgttcgggttgccgttggggtgacgatgtgtggtgaagggaattccaccgatcgtggcttgcggggcgattatcgggttgttgaacgtcgtagtgccattgatcaccacgtttgccgcggtcatggtcagcgtaccgccggcttgcagggtcattgctccggcggcctgcaggttcaaatcgccggtcgacaagatatcgatgccgccggcctgagtgaacttgacccactgcgtggggtccgcattgaggaacccaccgaagtacaggccgtcacccgtgtcataagtgcgatctgtcggcggggcgcccgcttcccgggtggcgaccgcgttggtgatgtcgcgctctgcgaagactgcgagtcccagatcacccactgcggggtccaagatgatcgccgaggtgcctccctgcaggcgcaggtacggcaacttgaagatcgggctttgggcgatcaccacgttactggtgtcgcggtcctgcaccaatggctgcacgtccacgaaccccacagttccggcggtcgggtagacggcgagcaccttaaccacatcggcggtgtggatctgacgcagcaagcgcaggatcatgaactcttgtgcacgctcggcgttgaattgtgtctcgaacggcgcgttcagctttggggcggccatcacagcccccgccgcttcttggcttcttcgagcgtcagcaattcgactaactcccaatccaacccggcgatgctggcgtttgcgagctcgagcgcctcggctccacttgcggcgcgaaacacctgcgtgcgcatgttggatccagcgcgcgcgaaccgcgccacgaagtccgaagggtcgatcaccgccgacaatgcggcgtcgattttaggcgctcgcgccatcggtgttccccttagtgccaaacgaattggctgcgatgttggtcatccacgccccgcctggcgtattgggctgcaagttgtgctgcaacaccgatgcaacccacttcgtccggttcacgaaatcgaactcggtacgtacgtctagcggcacgccggggcgaatgcgtgcatcgaacaacgtggagaacgacaacccgctggtcgaatataccggataccccaccatgcccgtctccctggcgacggggatcgcgttttcgtcgtagggctcgtttgcgttgcgcacgatgaaccgctgcaggttgacgtgccacgtcagatctgggaaataggccatcagcttccctgcctgttcgattggcgtcccggtcacgcgggcccgggtgatgtagatatcgggcaccgtgtcggcgtagtccaccacgaatccgacgggctccaggatcgcggtaagcgcatcccacagcgcgaccgggccctcttgcgcgtaggggcttgcggttgcgatcatccccgccatcgcgtcgttcgcttcgatttccagagcgacctgcggctgctgtgaggcattgacggtcgaccacgtgatcaccccggagaagaacggtaggtacgcctggccatcccagacattgagttccagcatatcggtcgcttgcggcgtcagtgcttcgagccacaggcgcgcgatctggttcatggcgtccaagcgtacaccgtatatgactactttcgcgttgccgaattgcttgccgccttgcgacacagtaatcgacatccgatgctgctcgaacgcgtattccaggtcttgcgcagtgccttcggcgtcggggcgccgcacacgtacgatgacctgcaccttgcgttctttgaacgggttcaacgcatcaccccaacatggttttgcgtgccggtcacgcgctgaataccaccgacgaagtcctgcggggtgttcgccttgacctcgacgttctgaatgttgaaaacagtcgcggccgaagtcgtctgtccggttccgctgcgttgcgccgacccgccgtagctatcggcaagtacttgtgcatttcgtgcgcgccgggcgtcctctgcaacgttgccgtgcgcctcgtagcggcgggagtattcgccacccagtcggtaggcgtcgtcaccaccgctgcgcttgacttggtcccatagctggcgctcatagggatcggtgagcatgaagttgatctgctcgtccaccgaggctttggtaggatccacgccgtacatgcgtttgaacgcttcggtgcgcgggccccgccactggcccaacccgcgcgcgccggagccgccaccggccgggttgtaagccgtgggatccagtgacgattcgccttgccaattggacgtcacagccgcggcctgggcgaccgtcaagccgtgcttggtgaccagcgtttccatgaattgctgcgcgttcgccgagggctttgccccaagtcgatcgttctcgacattgcgcggcaagccgtcggcagtgtcgttctcgatgttacgcggcaagccgcgtccagggtcgcgcgctgcacccaccgcgcccgcccaggtgctcgacgcccaactggcgaccgcctgggccccggtgcgcgccatgttggcgattgcgctgacgtccttcccgttctgtccgttacctccggacagaaactggagccacttggacgtagcccacgtagataccttgtcgagcacgtagctcaacacgtcgccgatctggcgaaaccgcatcgcagcgtgctccagccctcgcacgaactcggacacgttgtccgaacgcttggtcagcgcatcgacgaaggcatcgacgccacccccggcgtcgcgcacttcaccggcgaacgtggacacgtcgcgcgcgaactcgcccaacttgaccgcgccccattcgacagcgggctgcagtacgtccagcagcaccgtagcgacgctgaccgcctgtgccttcatggactccagggagtcggcaagggcatcgagcgccttgcggttttcgtcgctggcctgggcaaatgatcgcgcatattcggcgcgtgcgtctttctccgacttgatcatcaagatcaaatcggcagaggcgccctgcgcggacagagtgttttcgatctgttggcgttgttccggcgcggcacttcggtagatctgctgcgcctggccgagcatgtcgccgacgctgacgtcttttccgacgcgcacgccgaggcgcgcaagcgcctgcatggtcggcgcgttgcccgtcaagttgaactgctgttgctcgcgcgcgagcgcggcgatcgcctcggcgccggcgtctgcatcggcgcccaagcgccgggccgtcgccccccacgcctgcatctcgcggttcgacaacgaggtgccgacggcctggcggcgcaaaccggtctcgaagccgagtaggttggtcagcgccccacccgcagcaacggcgagtccgcccatgacggtgaccgcggtcagaacggttgccgcgaacgccttgacgctcgcgccgttatcgcgcagccgtcgcatctggtctttgtcgcgcttggtctgcgcatcggtgcgctcgcgcaccttgcgctcggtggttctagcttgcgtatctactttcttctcggcttcctcgtaaggctccgcatcgagggtcaatcttacgacgagctcgtcgactacagtgctggccatacgttatccgccgatgtagcgcttggcggtggccaacgctgttgtggctgtagagacgacagacgagtagacccgcccgagctgtgcgaccggcccggacttggcgtctagcgggttggaggccgcatcctgcgccgactggatctgcaacacctgcgagaattggatctccaggtacagaatattcgagccgcggtcttgccgggtttggtgcgacatccgcacgatcgtgtagtcggcgtagaccccttgcggggtgattaaggtgtacagctgcagggggttattcgcctcttgctgctcgattgcggccagccatgcgaagcgggcaagatccgagccccctttgccgagcacgacatcgatcgtccgagggcggcgcactttgttgtacgcggcgaagccgccctgctcgattgggtagtcggccacctgtgcctcgtagcgcggcgcgacttcgatccactgcgaagggatcgtcagcgggatcgcggtatcggcgtttagaaccgcgtagatggcctgtggcgggctgatccgcggaaacgctttggcgaacaacgccgtcgcgttgaacaccgcaaccgggttgagcgatagcgccacggcttacgcgctcttgaccatgttggccgtgaagaacccgccgatgatctgacccagcgtggccatctcgcggatgtctaccgcagtcgcgcgacgcactgcgaccgggttgtttgggtcaggggcgatactgacgtgcgccaggatatcgccgatcaatgcgtgcactgccttggggtcgcaacccatcatcagctgcacgacggtctctacgaccgacgtcccgtccatcgccttgccgtcttgcttggcttgcttggccgcatcgacaaagtcggtgatcacggacacgtcaggtacctgcagcgcggacatcaggcgcagcatgaaaccggccatgtcatacggcaaaagctcggcgataatgaacgacttgccgtcgtcgcggccagtagtagcgcggatcgtcaagtctcgagtgtcggtgtgggtcatgggttgctcgactgtagggcatgccaatcgcggatggccgcgacgttgaccagttccaccaggttgaacacgtcctcggtgctgagtacggtttctaactcgcggtacgtggcgtggccggagtgtagcacggtggcgatatgcgacgagcagaagtgaaccgcaacgtcgctgtcaccgcgctgaatcccggcgacgtgcatggcaacaggcgcttccagtcgaggccggtcaatgacgaatcccgcatggaggagcaaagcggcctgttgcaatacgaacacgttctcccagcccaacggctgccggtcggcgtctacgaacggctgcagcagtgcgttggatcgctcaccgagctggcgcactgcgcccatgtgctcgaacaccaagccgatgacgcccccggcgagaggcgcgcctgcttcggccaatgcagtgcgcgctagacggtctgcgacgagcgcaggtcgctctatgagggtaatcgggtgcccagcatcggcgccggtcagattgactgtgagttgcttgagcacggcatggctccaaataaaatgggccggggcgcccacacgccccggcccaaccacacccacggaccgcccacatttgcggcaacgacaggttgcacgcagcgtgcgtggttgtcaagtgcctagcgcagtgcgaacgccttcactgggatcgtgaaattcgccccgaggaccaaggcggggtgcacaatcgacacacggatcgtatcggcgacgaggcactgggcggcgccgaccgcgtagccgtccggaatcgcaccagttgccgcaacgaacaccgcgtcgccgaccatggcgcccgggcagggcacaacgacactacgagcgcccgcgccgagcgccaaggccgcggaataggagacgttgacagtgcccaggtcgtagcgcgtcgatttggactgcgccgcggtgagcgcggccgtcgctttgctatctgccgagccggccgtcgtcgctgccgcacccgcttgcgtctgtgcggcggtcgctttgcgctgcggtctgggccg

SEQ ID NO: 35 - DNA, 44378 bp, unidentified
  misc_feature 1..44378: note = the genomic sequence of a bacteriophage
  source 1..44378: mol_type = unassigned DNA
actactggccgcgacgacggcaagtcgttcattatcgccgagcttttgccgtatgacatggccggtttcatgctgcgcctgatgtccgcgctgcaggtacctgacgtgtccgtgatcaccgactttgtcgatgcggccaagcaagccaagcaagacggcaaggcgatggacgggacgtcggtcgtagagaccgtcgtgcagctgatgatgggttgcgaccccaaggcagtgcacgcattgatcggcgatatcctggcgcacgtcagtatcgcccctgacccaaacaacccggtcgcagtgcgtcgcgcgactgcggtagacatccgcgagatggccacgctgggtcagatcatcggcgggttcttcacggccaacatggtcaagagcgcgtaagccgtggcgctatcgctcaacccggttgcggtgttcaacgcgacggcgttgttcgccaaagcgtttccgcggatcagcccgccacaggccatctacgcggttctaaacgccgataccgcgatcccgctgacgatcccttcgcagtggatcgaagtcgcgccgcgctacgaggcacaggtggccgactacccaatcgagcagggcggcttcgccgcgtacaacaaagtgcgccgccctcggacgatcgatgtcgtgctcggcaaagggggctcggatctcgcccgcttcgcatggctggccgcaatcgagcagcaagaggcgaataaccccctgcagctgtacaccttaatcaccccgcaaggggtctacgccgactacacgatcgtgcggatgtcgcaccaaacccggcaagaccgcggctcgaatattctgtacctggagatccaattctcgcaggtgttgcagatccagtcggcgcaggatgcggcctccaacccgctagacgccaagtccgggccggtcgcacagctcgggcgggtctactcgtctgtcgtctctacagccacaacagcgttggccaccgccaagcgctacatcggcggataacgtatggccagcactgtagtcgacgagctcgtcgtaagattgaccctcgatgcggagccttacgaggaagccgagaagaaagtagatacgcaagctagaaccaccgagcgcaaggtgcgcgaacgcaccgatgcgcagaccaagcgcgacaaagaccagctgcgacggctgcgcgataacggcgcgagcgtcaaggcgttcgcggcaaccgttctgaccgcggtcaccgtcatgggcggactcgccgttgctgcgggtggggcgctgaccaacctactcggcttcgagaccggtttgcgccgccaggccgtcggcacctcgttgtcgaaccgtgagatgcaggcgtggggggcgacggcccggcgcttgggcgccgatgcagacgccggcgccgaggcgatcgccgcgctcgcgcgcgagcaacagcagttcaacttgacgggcaacgcgccgaccatgcaggcgcttgcgcgcctcggcgtgcgcgtcggaaaagacgtcagcgtcggcgacatgctcggccaggcgcagcagatctaccgaagtgccgcgccggaacaacgccaacagatcgaaaacactctgtccgcgcagggcgcctctgccgatttgatcttgatgatcaagtcggagaaagacgcacgcgccgaatatgcgcgatcatttgcccaggccagcgacgaaaaccgcaaggcgctcgatgcccttgccgactccctggagtccatgaaggcacaggcggtcagcgtcgctacggtgctgctggacgtactgcaacccgcggtcgaatggggtgcggtcaagttgggcgagttcgcgcgcgacgtgtccacgttcgccggtgaagtgcgcgacgccgggggtggcgtcgatgccttcgtcgatgcgctgaccaagcgttcggacaacgtgtccgagttcgtgcgagggctggagcacgctgcgatgcggtttcgccagatcggcgacgtgttgagctacgtgctcgacaaggtatctacgtgggctacgtccaagtggctccagtttctgtccggaggtaacggacagaacgggaaggacgtcagcgcaatcgccaacatggcgcgcaccggggcccaggcggtcgccagttgggcgtcgaacacctgggcgggcgcggtgggtgcagcgcgcgaccctggacgcggcttgccgcgtaacatcgagaacgacactgccgacggcttgccgcgcaatgtcgagaacgatcgacttggggcaaagccctcggcgaacgcgcagcaattcatggaaacgctggtcaccaagcacggcttgacggtcgcccaggccgcggctgtgacgtccaattggcaaggcgaatcgtcactggatcccacggcttacaacccggccggtggcggcaccggcgcgcgggggttgggccagtggcggggcccgcgcaccgaagcgttcaaacgcatgtacggcgtggatcccaccaaagcctcggtggacgagcagatcaacttcatgctcaccgatccctatgagcgccagctatgggaccaagtcaagcgcagcggtggtgacgacgcctaccgactgggcggcgaatactcccgccgctacgaggcgcacggcaacgttgcagaggacgcccggcgcgcacgaaatgcacaagtacttgccgatagctacggcgggtcggcgcaacgcagcggaaccggacagacgacttcggccgcgactgttttcaacattcagaacgtcgaggtcaaggcgaacaccccgcaggacttcgtcggtggtattcagcgcgtgaccggcacgcaaaaccatgttggggtgatgcgttgaacccgttcaaagaacgcaaggtgcaggtcatcgtacgtgtgcagcgccccgacgccgagggcactgcgcaagacctggaatacgcgttcgagcagcatcggatgtcgattactgtgtcgcaaggcggcaagcaattcggcaacgcgaaagtagtcatatacggtgtacgcttggacgccatgaaccagatcgcgcgcctgtggctcgaagcactgacgccgcaagcgaccgatatgctggaactcaatgtctgggatggccaggcgtacctaccgttcttctccggggtgatcacgtggtcgaccgtcaatgcctcacagcagccgcaggtcgctctggaaatcgaagcgaacgacgcgatggcggggatgatcgcaaccgcaagcccctacgcgcaagagggcccggtcgcgctgtgggatgcgcttaccgcgatcctggaacccgtcggattcgtggtggactacgccgacacggtgcccgatatctacatcacccgggcccgcgtgaccgggacgccaatcgaacaggcagggaagctgatggcctatttcccagatctgacgtggcacgtcaacctgcagcggttcattgtgcgcaacgcaaacgagccctacgacgaaaacgcgatccccgtcgccagggagacgggcatggtggggtatccggtatattcgaccagcgggttgtcgttctccacgttgttcgatgcacgcattcgccccggcgtgccgctagacgtacgtaccgagttcgatttcgtgaaccggacgaagtgggttgcatcggtgttgcagcacaacttgcagcccaatacgccaggtggggcgtggatgaccaacatcgcagccaattcgtttggcactaaggggaacaccgatggcgcgagcgcctaaaatcgacgccgcattgtcggcggtgatcgacccttcggacttcgtggcgcggttcgcgcgcgctggatccaacatgcgcacgcaggtgtttcgcgccgcaagtggagccgaggcgctcgagctcgcaaacgccagcatcgccgggttggattgggagttagtcgaattgctgacgctcgaagaagccaagaagcggcgggggctgtgatggccgccccaaagctgaacgcgccgttcgagacacaattcaacgccgagcgtgcacaagagttcatgatcctgcgcttgctgcgtcagatccacaccgccgatgtggttaaggtgctcgccgtctacccgaccgccggaactgtggggttcgtggacgtgcagccattggtgcaggaccgcgacaccagtaacgtggtgatcgcccaaagcccgatcttcaagttgccgtacctgcgcctgcagggaggcacctcggcgatcatcttggaccccgcagtgggtgatctgggactcgcagtcttcgcagagcgcgacatcaccaacgcggtcgccacccgggaagcgggcgccccgccgacagatcgcacttatgacacgggtgacggcctgtacttcggcgggttcctcaatgcggaccccacgcagtgggtcaagttcactcaggccggcggcatcgatatcttgtcgaccggcgatttgaacctgcaggccgccggagcaatgaccctgcaagccggcggtacgctgaccatgaccgcggcaaacgtggtgatcaatggcactacgacgttcaacaacccgataatcgccccgcaagccacgatcggtggaattcccttcaccacacatcgtcaccccaacggcagcccgaacaccggcgcgccgatcgcgtgaaacgctgataccatagaccgatgagcacaaacgtccccctgccaaagtttctgccaaccggcttgtcggtgccctcagagccggagattctggcgggggtgcaaaccgactggatccacgcgtttgccctgtcagggaaagcactcaacgccgagttgaccacgcctcaaggtcagctgcagcaaacccaagcgtttattttggcggccatcaatgcgcagctgctggagctggtcgctaacgtcgatccgatgaccagctctggcgcctggcaagatgcgctagggcgcatctacttcctgacgcgacagcctgcgacctacgctacggtgcaagcgaccgtacgcggcacagttggccaagtgttaccgctcggagcgcaggcacggtccagtgacggcagcttatgggcatcgacccaggccgtgacttttgggacgggcggggccgcgacggttgtgttccgggcagtgcaaatcggtgcaggccccgcggccggcgtcaatgacttgacgatctaccagcagcagacaggttgggagtcgatcagcaacgcgacggggagcgtgccggggttggatgtagagtcacgccaatcgttcgaggagcgccgtgcgtcatccgtcaacatcggcggcaacggcacggcgagcgcggtgcgcgctgccattgccaacgtgacgggggtgaccgatgtctttatctacaacaacggtagcgtcaacccgatcaggtatggcgcgacgaactatccgatcccggcacacagcttgggcattagcgtcgccgggggcgcagacgcggacatcgctgccgcaatccattccaaactcgactgcgggtgcggcttgccgaccgcccccggtttggggacattgatcacgcagctgatcgaggattcggaattctatgccgagccttacccgacgtatctgattcgcttcgtgcgccccgcacctgtgacgatctacgtcaccgtgaacgtcgccaatctgtcgacattgccgagtacctacgtgcagagcgtgcagaatgcggtcgccacggcgctgacgacggggtttgcgactccggacggctctatcacagtggaccgagcccgaatcggcggtcagatcgtcgccgcagaatacttcgccgcagtactggcgctacgcggcatcacccccgtgtcgattttcattggtacgagcccttctcccaccagcggcgctgcgttgaccatgggcatcgatcagttgcccgtctgcaccccgctagcggtcactgtcaacgccgtggcggtctgacgtgaccgactatctgcgcactgtcatgaagcagtacgccaacagcccgatcatttcgggactgttggcgagcttcgacgagtggtgcgacctgtcgcggttcactgccgatttcctctacaacctgtgggatatcagcaccgcgacgggctatggcttggatgtctgggggcgaatcttaggccaggatcggtacttgcagattcaacaagtaccgggtaacaacttcggtttcaatatcaacgatgcggtcggcacgcaatggcagccgttcaatcaagccccgttcttcaatggtgccgctggcgggactactgcgtttgcgctagaggacgtgtattaccgcaagctgctcttggtgaaggcggcgtcaaacatcgccagttgcgactgtccatcgatcaatgcgctcatgcgcgcgatgtttggcgatcgcggtaagtgctacgtcggctacgatccgaatcagccgatgatcatcggctaccacttcgagttcttcccgacggccgtagagcggtctatcattgaatcgggcttgtttccgcagccggcaggcacaaccgttcgtttcctgtacaaaaacctcacgtacgcgccgttcggttttgctggtgcgaacactggtgcgaatcctgaatacgtgacgggcttcaatcaaggcccgttttacaacaatccgtaaaggcgacttaccatgcaatctaccggccggccaaccaagttccttgtgccttttgccaacaacgactccgcgaaagtcgagctgccgctgacgacggccgacgccacgcgcgcttcgttgcgcacgggttttccaccactgaccggccagccgcccgaggccggcggcgtgcctccgcagttagaagacatgaacggcggactcaaccagatgagccggggcgcttggtggccgatgctcggtggccggtggccgtatgacgcgacctttgctgcggatgcggcgatcaacggttacccccagggcgcgttgctgccgtctgcagatggcctgggcaattgggtcagcaccgccgagaacaacactgccaaccctgacgccgacagcaccggctgggtgccaggcgcgttctacggcgcgaccgcgctgaccaatcagaccggcggcactgtcacactcgtgccggcgcaagccggcaaacgccgcatcacggtgagcggcacgctgacatccaacttggttatcgtcgttccgaattggatctactcgtgggatttcatcaacacgacgagcggcgcattttcaatggtagtgcgtaccgccaccggggctgcggcagtagtggaacaaaacggcgagcgtacgccggtattttgtgacggcaccaattgcacgttgggcagcccgaatatcgcccaagccacacgcccaacccaagcgatacggttcgatcaagctgtgggccgtctgctcaacgtacaacgctttacggcgagcggcacgtacacgcctacccccggtaccgctcgcatcgtggtagagattgtgggcggtggcggtgcgggtggcggtgcccagtccaccaacaccgcggcggcggtcggttgcggcggcggcggcggtgcgttcgtcaagttcatgctgactacggtacctagcagcgtctcggttgtgattggcgccggcggcgccagcgcaaacggccaaggtggggctgggggtacgtcctacttcggcgcgtacgcggcctgcagtggcggtggcggcgggcgtacgttcggtgcggactccagcattcctaattttggcggcgaaggtggctccggcggggatacagcgaccgtgggtgccggcgccgttgctctggttgcctcttcgggcgcgtctggaggtgccgcaacctcgctcggtgccggtgcttacctgacggccggtatgggaggtcctacgtatttcggcgggacggcaaaaacggcaaacacgactgcgggtgcgagtgcaaaagcaaacaccgggtgcgggggctccggcactacggcggcatccggcgcggtgacgatcattcaaggcggcgccggcgcggcaggtctatgcctggtgtacgagtacgcctgaccaaagagaaacccgccgaaaggcgggtttcttgtttactcggtgtcggcctgcgactccaaggcttcaatcgattgcaagtacgcttgcgcgtcagccaccgaggagaactgcgccaaggtggcgtccttgtggtcaaggatcgctgcaccagttgcggtggcggcgacgcgtcgcggacggatcggcggggtcaggatgataatcgtgctcacggcttcttctcgtttagctgctcgggtttgagcgagggggccagcgcgtatatcgcggtcaggtgatcttggagccgatcgactttgcgctccagcgcggcttggcgcactgcggcttcggtttgtcggccgccattggcgatgttccagccgaagaacagcgcggcgatgaccaccacgacccacatcgccgtcgacggcccctggccgttgatcgtcgcatgcccgccgttctgacttccaaactgccgggtcagcaggtcgtcgacgcgcgtgatgagctgttcgcgttgttcgttctggtgttgctcatccatgctgcatcgctccttcaagtcgatcgagtagtgagttgatgcgcaatacgtgcttgcccgtcggctcgtcacgtgccgcggcggtccgtaggtccagcagggcgctctgcagttcggcgcgaatcgtcgcgatttcgagctgccgggccgccacgcgctccaaagcgaccacgatgtagggcatgacgcgcatgcactcatcggcgcgcgaacgcatcggcatagcgatggcgcgacgacccctggcgatcagctcgctcaactcgctgttcgacggcgccggcttgccacggtatttgcgctccagccgttccatgctcaccacccggcgaatgaatcggcgccagggctggtaatgccccgcgaatacgaacatgccccagatgccccacatcagcgcggatccgcgccaggtgtagatgttgccaccaactgcggcggccatcagcatcatgaagctgataaacgtcacgatcaggtgcgacagcccttggaagaagtcgatcgcgccgggccaggtcagtgcctcgcgcagcgtcggggatcgcacagcgttgagaccgaatagcgcggtcagccagatgccagcgagcgcaggaatggcgaccagcgaccacacgtgcggcgtgaccgcggcggtgtaagtgtgcagcacgttcagttcactcagcatgcgatgctcccttgttggtggcgcgcaagcgcgcaagcgcgatttcgatcaccaccggggcccagtactgctgcgtgagtgcgagccccatgcccatgacggcctggtagcccgctccgttccatacgtaccctgtccactcgggaactcctaccacggcgacgagcgtcatgataaacgatacagcaaaagcaccaagcagattacctttatgttccacgcgcttgttccacacaccgacaaacgcgccgaaggcaatggccatcagcacgttgaatggcacgcccaaccccacgtccagatgcacccagggggcattcggcgctgcagctgttgtcgcgctggctgcgatgacaagcgcagcaagtgcgttggttgcggccacgaagccccctacgaaaatgaacggtcagagaataccaaacaactgcttggctttggacaacttcgtccggcgatcttctagaccccgaaggccgccattgatggcgcgggtaacgccttcgaggtcgtcggcctgggcgcgcgtccggcataccggcctgcgcaccgtccaataccaaaacgcagcctcgaccgcgtccgggagctccgccaatagctcgggattctcgacgcaccgatcgtcgttgtacttccacgccgaataggccgcatagttgctgcgacccgtgcattggatcagtccgcgacccttgaagcgcgtgccgtcgcctttctgcgtattgccgaggtcggcgcggccctcgtaggccgcgccggatgcgtattcgaccgcggtggcgaacccgtccgattcgtgcgcaagttgggcaatcagatgcgccttctccagcggggatgcgatgccgtgccagatgcaaccatcctcgatcggcttggcgtacttgccagcacccagtttctccgctacggtttcagtgctcatagtcatgcagtcctcagcggccgcgcaggcggctccagaatgcggcgatcatactccggaagcgctgccagcgcgacggacgctttagccgctccgtcacaccaccctcggtagcgaataaccgctgcaacgctccgtgcggcagccccgaggtgccgtgttttgtcacgtacttgtagatggccgcgccggctaccgcatcgtagcgcgccagcgcgcgccgcgaccccagcgtgtcacgcgtctgcgcgacgtggaataggtacgacgtcgaggaggaccgggggtgtacagttgcaccgtcggccaccaggccttcggctaggtactgtttggcctgctgcagcgtgctcgcaagcttacgatcgtccatgtcagtactccacgtacttggggcgaagatgcgctggcagcgcgtcgaatgcgaagttctcggcataatgttcgagctcgccatagtacgatgccaccgcagatgcgccggcagcgctgccttcgcggtggagtgcatcgacgagctcgtcgacggtcgggttcaccagcaccttgccggtgtgggtcaagacggctttcgacagattgtcgcgcagctgttcggccttggagacgtattcgacgtggagttcggccagggaggtcatagtgggttcgatccttttggggtggagggtgcgcgctgctgcgctagcttcggacgcttctggaatggttgtgaaagtgcccaagtgcgtgtattgcccaccgatgctaccgacatagcgccgtccattaggcgcgactgtggcatatacgccagttagcatgacaactctgtgatcaccacgcgcacaaaccccgacccactacaaggccctcgtagaatgtgcagttcgtcaatttggctatcgtctcgccacacgcgttgtttcgtgagcaagtcgcacaacagtttttcgcggttggccaaatcgtaggcgcgattacgatacgaagcgggtccgtgcacatatagcgtaacggcgaggcgcccctcaagggtagtaacacgacccactggcaaagcgccggctgcagctttcgtccaagcgcgcgcggcggccgacagaatgatgcgtccgccaaagacgcgccatattctgttgagagacggaggtaggggtagcactatgtccatcgtggtctcctcgcgaaaccgcccggcgtagccgggcggtgatggtcaccaaggaatttggtcatcgtccaattcgattagcggtgagttggacctactcaccgggccgcgaaagggttcccggactgggccgccgtaccctgggcgaacggattggcgttcgccggcgcggctgcggctgcggctgcggctgcggcaggctgcgatgccggagctgcgggttgcgctgcgggcgtttggccggggcgtacgccaaacgcttcggccgaatcgttgccaccagcacgacgttcgccgccaccgaccgacatgagaccgagcagcccgagcgagatgccgcggcgattggtcttcttgtggaaccagctgaacgcatttgcgttcacacgcacgtgttgccccgagaaaaactcggtcttgatgcgtgtggtgttcagcggcgtggcggccagcgcttcgcccgaatccagatacagctccggagcgtattgcgacgacatgcgggcgatcagccagttgtccggaatgccgggcgtgggcttggccatcgaggagttcaacttgggcgccagttcgtggccggcgagctggcccgattcggaaaccgcagtcatggcgctgaccagatcgctttgcgcttccggcgggaatgcgacgacggcgtaatactccagcggggcatcgtccgccttgagcttgttcttttcgggagccgcgagtgcggaatacaacaggatggcggtgtggtctggaatgctcataggtatctcagttctcaggtctcaggttgataggaagcggcccagttcagaaccgcgatacaacggtattacgtatgtggtgagatgtcaagcagtttcgaagggtctgcggcggcgcatctctgcgcgcaccgctgccagaccttcggcagtcaattgggggcgacgccgcatccggtcaacatgactggcgtctacgaatgctacatcacgcccacgcagcggctgtcctgcgttgttcagaaactgcggcttagtgtgtttttgtagccaccaactgggcttaatttggaatttccgcccgcagacgctggttccggtcattacgagccaaactgtttcgcccggacttatgtccacacacaggaaaggccccgagcgaaactcaccggggttgatgcgtcgaacccgggaatctgcgaagagcacggcagtgtcgagataagccacgattccgggttggatttgatcgagggttaaagccatcagttgttctccgcctttccaaggtactttgcgaacgcgtcgcgcgcaccgctcaggttcttgcccccggccggcgagtggatgaggacgtcgggagcgcgtccaatcgccgcggtgatggcttcggtcgggatagcggtctcgcgcatcttgcctatgctgggcggcaccagcaggtcgtagcgctcgtggatgagcagttgttcgatgaccacctcgggatttacccacatctcggcgcccttgcgccgggtcgtcttgacgactgggtctcccgcttcggcgagcatcttgacgcgctcgcgcaggtcgtcttcgaattgcttgaacgcgctgcgtgcgccccacaggtgcatcacctcttcgggcgacaggtcgaccacggcccgcctgcccgactctacgtccaatgcggccgtgccgtactcggacgcggccgggcaccagcgggccgacgggcagtacttgcagtgttcgccaggtgccgggggcgtaccgcccgggctgctggccgcccgggccaccgcatgcacctcggcgtcgagcttggcgcgctctgtggccagccactcaggggtaagcggcgccagcacctggaacggctcgccgaagcgaatgcgcggctgatagacgaatgcgccagcgtgcgtcgggtcgatcttgtcggtgccgagccagtcggacgtcagcactgcgagtgccccggccacctgctcgttcggctcgtctaacgtaccgcagcctaccggtgacccgccgtacttgtagtcgcccacgaccaggcggcgcgcgacgccgttccagagcatcacgtccgccacggtgcgcaattcgaccccgtggatgtgcgcggtgaaccggaattccggtacggcggacgacgcggtcgcacaatccgaaaacaacgactgcgcgtgcgcgacgtactggtcggcgtgtgcgtcgacttgcgccacccagcgcgtgacgccctccgccgagtaatcgaagccttcgagtccggccggcggctgcaccggcactgtcgagcgttgcgtcgacggggcgaatgcgtccaatacgcgcgcctcggccactttgtgcgcctcggtgccctcctgcgcggcggggccagactgcgtgcggatccgaggcagcacggctgacagcgcgcacttggaccaacggaaacggttggacatggtgaggatgggccgtgacgggtccggcacgaccagtcgtgcgccctcgggtaggtcggacggtgcgggaaagtcgaaggtcatgtggtttcctgggttgtaaggtgcagtcgccaccctacatatccacagggcagatgtcaacccaaagtcaactattcacgcaatagtgaaccaaacgtactagatgccagaggataaagctcttaattctctatatttaatgccaatgaaaaaaaggaaatttaagtcgatataattcttttgatttcacgttttagatatagagaggtttgttggtactttgcgtctgttcctctgcgtcgtgtacttttggttcatgtggtgcggggagacgcgtttcggtccagatgcgatacactccgcacatgtccgaccccacgccccatacagaactcgctccgatcaaggcgtcgttgatcgcggacttggtcggcttgctgaatctcaacttggcccaagtggtcaaggcgtctgcggtcgggtgtccgacatgcaagggcctgggcacggtcggtgacagcgaggtcggtcaggacgtgacgtgcccttcgtgcggtggcgttggtgcgatcgaggcgttcgtgctggacatggacgccatcaaaacacccgaggtgggccgccacatcgagcagtgggagtacaagcagggccagttcgttccgaagtttcggcctaagtcggcggctttcgcccagctgaccaagatcctgggcttcgacaaagcagtgctcgaggtggccggcgccgtggccttcgccgacgcgctgtcagacgagcagcgcgcgcagatcgtggatcaagtgcgtgaactggctcaggccggcgccctgtgaacgcgcaactcgtcccagatcccgtgctggccttgatcctcgcagcgcgcaccaatttcgcggcgttcgtctcggcggtgcatcgaccacgctttgtccacagtcatttttcgttgacggtatgcaaatccctggatgcattcgtggaggacgtaatcgccggcaagcgtcccattctggacctcacggccccacctcaatttggcaaaagttcgcttatttcgcggtgtctgccggggtatttgatcgggcgactaggccccgcgctcgggcaatgtcgcgtggcgctgtcgtcgtatgcgctgtcgcgcgccaaggcaaacctacgcgacgcgcgcagcgtgatggccgagcccatctaccgcgaaatatttccacacgccacgctgataggctacaaggtcggtcaacacaccgccgactacttcgaccacccgttcggattcgtcaaggcgcaaggcgttggcggcagtctcacggggttctctatcgacgtcgggcttaacgatgacttaacgtccgatgcccaggacgcacttagccagaccgtccaagatgggcaccttgactggtacctgacggtcttcggtacccggctccagcagcgtagcggacaggtaaacatgggtacgccgtggtctgccaacgacatcatggcgcggatcaacaagctgcacgagggaaagccgaactatcgccgcctgagcttccccgccatcaacgctcctgacgaggtgggcttcgacccggatttgcccgaaggctcgctggtaccggcgctgcacagtgaagagaagctgcgcgagattaaagcggccatgtctgaggcctggtgggcggccatgtaccagcagcgcccgctttccgaattgggcgccattttcggcaagggcggcgtgcgctactaccgcaaaaccgacctaccgacgcaattcgtccagaccatcatgaccgtggacgccacgttcaaggacgacccgaagcggagcgacttcgtgggtcttggtgtgtggggaaagacggcagacgaccgcgtatggttacttgcacatcgacgtgaaaaattgtcgttcacgcgcacggccgaggcgatcgtcgcgcttaagagcgcctacccgcagtgttcgcgcatattcattgaagccgcagccaacggtcacgcactggtggatgtactttcaaagcacgttgtgggcattgtgggtgtgccagcgcttggtagtaaagaggctcgctggcatgcggttgcgggcatttggcaatccggtcaagttctcctcccacaccccgaagaagtcccgtctattgtgcctgtcgtcgcagaaattgttgcagctcccgacgtgcgtaacgacgacatggtcgactgcatggccatggcgctttatcagctttgcatgcgcaacccgatcagcagcttgatcaatagtgacatcttgcggatggctggggcgcggtagttgccgcgcgcgcgccgcttacttggtcgcactttcgtgtaacatcgcgtcaaccgccccggagcccgctagatgacccgccgctcgactccccagcccgcaccgcaaccgcggcggctcgccatatcgcccgtcgacctggcgcgcgccgcggcgggcgacccggcacgtgcgacgcagacctcgctatctctggcaaccgcagaaccggtcgacaccgagcgctacagcgcgcgcgagcagcaagcggccaaggccgtacacgcgatggactacggcttcagccgcggcaatgcgaccgacgcgctgtcgttcgtctctgcgacgggctggccgggcttccagaccttgtcgctgctggctcagctgccggaataccgcaccatgcacgagacgctcgccgacgaggtcgtgcggacgtggggcaaagtggtcagcacgtccaaggacgccgctgcggcagacaaaatcacgcagatcacacagaagctcgagcagctgaacgtccgatcgcttatccgtaccgcagtaatccacgaccaggcatacggcggcgcacacgtgttcccgcatctgcgctccggtagcgtggacgttcctgccgactctccgctactgctcacccctgcgttcgtgacaaaggggtgcttgcaggcgttctcgtgcgtggagccgatgtggctcactcccaacgcctacaacgcgaccgacccgacgaagccgaatttttacaagccgtccagctggtacatgctgtcgacgatcgtgcacaccacccggctattcaccatgatcagccgaccggtcggcgacatgctcaaggccgcgtattcgttccgcggcgtgtcggtctcacagctggcgatgccctacgtcgacaactggttgcgcactcgccagtcggtcagcgatacggtcaagcagttcagcatcacgtacctgaaaatggacatggcgcagctgttggctccgggcggcgcccagtcgttgcaggaccgcttgaccctgttcaacctcaaccgcgacaaccgcaacgtcggtgcggtcgacatgacgaccgaggacttcgcgcagatcaacaccccgctatcgggtctggatgcgctgcaggcgcagtcgcaagagcagatggccgccgtatcgcacataccgctcgtcaagctgaccggcatcacgccggcgggcctgaacgccaatagcgacggcgagataagggtgtggtacgacttcgtcgcgggctaccaggtgcacaacacaggcccgctcatggagtggattctggatatcgtgcagctctccgagttcggcgagatcgatcccggcttgtcatgggactggaacccgttgtacgagctgaccgacttggagctggccgacgttcgcgagaagaatgcacgcaccgatcagacctacctcgaggcgcagatcgtcagtggcgacatggtcgctcagcgcttggcacaagacccgaattccgggtacgccggcatactggccgaccgcgacgcgctggacgaagtgcacgacttggctgaatcaatcctcgctgaagcgacgaccccacaaccgcaggccccaatcgatgagcccgatgctgaccaacccgacgcgcaagcagaagcaactggcggtgatcgggccgtcgagcgcagctgaacagcagtaccgcaaggcgttgcagcgcgccgtcaaggcgatggccaaaagcgtcgagtattgggcgcttgccaaataccgcgcagcgttggttgccaatcaggacgccgagaacatcccggatcccgaggccgcccaggacgccacgtccaaaacgccattcgacgtgcagcgcgcgctgttcaaagaactggaagccctgcgcactcgctgggagacgtacttcaaggatgtcgccaagcacttggcggtcgacgtggtcaacgcggcgtaccaagcaaacaagacggcgtggcaaggtcgcgtccgcaaagagggattcgacatcccgctgcaactgtcggccgcacagcgcaccattctggatgtcaaggtcaacgacaacgtcgcgctgatccggtcgatcccggagcaatacttcaccaagatacaaggcgacgtgtctcgggggttcctcgccggtcgggatctggaagcgatcgctagtgagctgcgcgacaccggaaaaaccacggtcaagcgcgcggccctcatcgcgcgcgaccagtcgaacaagctcaccgcgcaaatgaacagcgcgcgccagcgcgagctgggcgtgcgttacgcgtactggaagcacagcacggtcgacaaggatccacgccccgggcatatccgcgccagcaaagagctctggatattcgacacgcaggtaggcatcgatttcggggatcagttcggcttcgtgctgccatcgatggcgatcaactgccggtgcgggtcgcgcagcatcatcccggcgatcgacgaagacctcggcccggacgacttgctagccgttccgggcttccctggggcgtttactcggaagccgaagacgcgttagcgccggctcgcgcgagaagcaatagcacttcgacacaacctttgcgccagcgccgtacgccggcatccgcgcacacgtgcagcgtttcttcgtcgtcgtgcgttgcataccacttgtaagcaagttcgcttgggctcacgactgcacctcaccccgggctttggctagcacctcgagcgccattacggcgtcagacggctcgagcggcctacgcagcgtggcaaggaattcgagtgcgtcgtacaactcgggcgccgtgaccattacctgcgcattggcgcggcactgagcctccaagatgccttccccgcccagatgttccatggattggccgtccgcaatcgtgtgcccgtcaggagcaacgatgtagaacacggtgtgcacgccgtcggtgcagccatccctgaacttcacagtccacgggccgggagtccactgtggcgcaccgccggctttcgcttctgcttggtcgttcatgttgttagttcctgcggttgtggtgggagtcactttagcgtgaccttttgtgcttgtcaacaacaacgcttgcacgtttatgccacacagctatcatcgcgcgcatgcctgttgcaaccgctagttacgcgttcgataagaagtcggcccggtcgttcgatgccgacgggcgtatgcgcgtgcgcgactgtgtgctgtccgacgcggatatcaacccgtactacggccgtgagatccccgggtggaaagaactcggactcaagccggacaccgtgtacgagatgtatcgtgatccggacgcgctcgcgctcgccgccgactcgttcaacggcttgccgttgatgatccggcatatcgcccagacggccgacgagccgcgcaaagagcacaccgccggcagcgtctacaacgtccggttcgagccgccgcacttgcgcggcgatctgatgatcgcggacggcaaggcgatcgagttcgtccagtccggcatgctggccgatctgtcgtgttcctaccgctacaaacccgaaatgacacccggcgaagtcaacggccgtcgttacgacgggcgaatgatggcaatcgacggcaatcatgtggcgctcgtcgaagacgggcgcgcaaccggtgcgcacgtcgctgatagcgcgctctcttcccaaactggagcaccaaacgtggatccgatcgaaaacactcccgcaccggcggccggcaatgccgagttggcgcaagccctcgtgctgctgaccgaacagctcgaagcgctgaaagccgacgtcgctgcaatgaagggcgccccgtccgacgcggataaacccgtcgaaggcgtgccggccagcgtcaacaccgcgcacgacgaagacccggacaacgacaaagataaggatgacaagccagtcgcgatggacgccgcttccgtgcaggccgttgtcgacgctgccgtcacgtcggagcgcacgcgcgccaaggcggtcgagcaggccaagcgcgattgccgtccggacctgggcgacatgatcgccatggacaacgccaacgacatctatcgcgaggcactcaagcagcgcggcgtagacgtgtcggcgattcccgcaggcgccgaaatggcgacctaccaggcgatccagtcggtcacgcgtggctcgcgcctggatgtcaccgtgtcgcgtgccaacgacagcgcttctggcgcgcccgccttcgacacttcgcgtattcgcaatctcggtcgttaagaccaatcctcgggagttactgaaatgccctttcaatctactgttgctgtcaacccggcgattggcgtacctggcgactttgcctcggtcaatccccggcagttcgtggtgtccggtacgctgaatcagcgcatggtcagcgccccggcctcgccgggccccgcgttggccggcaagttcggtttgctgtcggcgaccggcaccgtgtcgagcacccccggctatgcggccgcatcggcgactggcgccgcaacgcgcatcggcttcgtgcatcgctacatgggcgcggcgctgatcaccacctggctcggtgaaacttccatgaccatccagcctggccaagcggtcgagctgttcgcgatcggcgatttcttcgccacggcagacgcgatcaccggtactccggtgcgtggcgctgcggtcatctgggatccggctgccggcaccatcaacatcggcgccgcagtgtcgagttccacgatcgacaccggcttcaagttgctgagcgagacggccgtcgcaggtcagaccgtcatgatcggcaagaacggcgcgtaagcggccaccatcgacaacctcatacaggaacagtgaccgtgaacgaacgtcaaaccatcaatgacttggcccgcgtcggcatcgtattgcccgatacggtcaaacaggtctccaaggaagcatccgcgtacgccaacgacgcgatcagtctggcccctacgctggtcaccggcgcgagcgccggtatcccggcgtggatgtcgatgtacgtcgaccgccgcgtgatcgacattcagctcgccccgatggccgcagagaagatcctgccggtcgtcaagaaaggcgactggaccacgcagtacgccgtgttcatcaccgccgagccggtcggtcaggtcgcgacctacagcgactggtccgccaacggcatgtcgaacgcgaacgtgaacttcccgtcgcgccagaactatatctaccagacctggaccgagtggggcgatcgtcagctcgccatcatgggcgaggcgggcatcgactgggcagcacgtcaagagatcgcctcctcgaccgtgatggccaagttccagaacagctcgttcctgctgggcgtggcgggcatcccgaactacggcctgatgaacgacccgacgctgaccgcgccggtcgctgcgaccgtcaactgggcgaccgccgagccggaagccatcgcgaacgacgtggtcgcgatggtgggccgtctgatcgcgcagtcggcgggtctgatcaccggtcaggaacgtctcgtcatggcgctcgcgccgtcggccctgaacgacatcaaccgcacgaacagcttcggcctgtcggccggtgccaagatcaagcagacctacccgctgatcgagtacgtggccgtgccggaatacgacagtgccggcggtcgtctggttcagctgtgggcaccggaagtcaacggccagccgtctggcgaagtggcgtacagcgagaagtaccgctcgcatgccatcgagcgctactcgacctaccagcgccagaagcacagcgccggcacctacggctcggtgatctacttgccgttcgccgtcacacaattgttgggcgcgtagcccagtaacaccgcaggaacaaaccccgcctaggcggggtttgttttgcgccacgtccagagtgtcttgccgctatcccacacccgcaaggcccctaccgcgtcctcgatgtcccactcggtgcgcgagtcgttagcggggtcgaacgctgcagaactgccgatctgcaacagccgcgttggtatgtgcttgcgtgcccaggccgacttcggacgaaacccaagcttccggtgatacacccggtaatccggctcgacttcctttgtcgcggtgaacccgagcgcctcatacacgccgcctgcgaaccagtcgtgagcgctgtagctgacgacgctctgtgcgcaaagaacggcgacggcatgcttaaacagcttagacgcacctccacgtacttgtgcactcgtcgcgaaccgcgtcaagtcccacacgcccgacttggtgcggttgcgcgaataggcatccaagttaaacgtcatcaccgccaccaggccgtgcaccgggtgctgcagcccgaatcggcgcgtgtagacccgccccggctgctgcggatggtaggcgtctaggaacgcgattgtttcggcagtcgtaggctccacaatggcgcactggcgcgcgtgcagcttggcatcttgcgagcagcccaacgcgttccggatcaatcgttcaaactgcggacggcgttccttccattcggcgcaggtaacagccagcaaccgatagcccgcggccgcgacagccgtccgtttatcgcgccccgccgtttttgagctgcgccggtcggagtgccagtacaccccgttcagttcaatagcgatgcgcgccgagggcacaacgatgtcgagttccttcggcgcaatcagtttccggtcagaaccgtaggcgtctgatttaagtgattgcacgaatgccagcaaatcacgttcggatggtgacgggccaaacttaccgcagcgcgggcagccgtggccgatcaagtgattgtttgcaatttgctgaaacggcccgtgctcgcgacagtgaattgtcactcgctcggtcgaacgcgagtagtcatcgatcgaatagtcgtagcggtcgccatgcactgcgcgcgccctcgcggcaaagtcggcctgcgtgaagaaccccggtgccgaagtttcacgtccgcacgccgggcagcccgaacccgcaacatgtgcgcccgctttctgcgtgaagcccccgtgcttggggcaaatgatcgacaccgtgcccagtgcgtgcgtgtacagcgtctgcgcatagtcgtagcgagcgccgtgcactgcgcgtgctctggcgatgaagtcctccgccgcggccgtgcgccgtgcgaggccacgctcggcagccgcgcacgccgggcagccctgaccgccgtttgcgtggtgtgccggcgtttgccggaacgggccgtgcgtgcgacaaactatcgatacaggatcgtcggcccgaacgtactcgacggccgaatagtcgtagcggtcgccgtggaccactcgagctttttcgatgaacgcgccgaggccttttcgctgcgtcaaactgcgagcccgaaggccgcagtcggggcagccttgcccagcgcgatgtttgtccggcgtctgcatgaatgcgccatgttcgcggcacacaatgcgcaccggcgttcgcgcatcgatgacctctgcggggtagtcgtagcgggtgccgtgagtgtgccggaaacgcaccaaccatccgtcgtgtgggatcttgcgagacatacttactccagatacgtgaggtgaactttaatcgcacccgacacgcaatgcaagcgccgtattcgtgtatcatcgcacgcgtaaaccacacctacaggaacaattgcaatggctcgcaaccgcaacgacagcaaccaaccgtccgacagcgccggcaccgtcaccatcgcgtgccgcctgcctgcgggcatgcgcttcgagaatgttcccggcatgccgggcggtgtgctgatgatccgcggcagcaacgacgactgggcgctcaagatgatcgaagagtacgaagcgcacggcctgaccagtggcgtaccggccgaagcgtgggactacatcgccaaccacccgtactacagcaaggccaagtggtacaccagtggcgccgtgtttgcgaccaccaaggccaaggatgcgatcaaggaaacccaagagcgcggccagaccaagaccggcttcgaagcgctggaccccgaagaactgccgggcaagatcgaagacgccgtcaaggccgaagccaagcgtaattgaccggagtagcgcatcatggccgtcgttgtctttgaccccgcagcattcaaagccgcgttcccagagttcgcgacggtccctgatgcgcgcttgaatatcctgttcctctctgcgaccggcgtcatcgacaacaccgatgcatcggtcatcgcggatgtggcgcgtcgctccgcgattttgtcgctggtcgtggcgcacctgctcgcgcagttcggtacgactgtcgtcggcaccggcggggcgaacccgtccggggtcgtcggtcggttgtccagcgcgaccgagggctcggtgtcctcgtccttcgagttcaacattccggcgtctgctggcgcggcgtggtggaaccagacccagtacggcgcaatggcttggatgttgctcgccccgtttcggtcgttccgttacgtggcgatcggccattccggcgagggctatgcccacgcgttcgccgatcggcgcctgtaccccgagggcgcgcagttgctgtccgaaaacagcgggacgcccaacggcgtatgaccaccgtccggcgctcgggtgtcaaactcccttcgcacatgcgcgagcagttcgtgcccgcgagcgtcaaggcaggcgtgctcgagggcgcgacatacccacaggatacatacaccgatcaccgtaccggccagcaagtcgccgatgcccgcggcgggatgcccgttgcggcaatcgctcaggcgctcgaatacggtcatgggcagaaccatccgcgcccgttcgtgcagtcgacattcgccgcgcagaatctcgcctggtcgcgtggtttgacccagttgatcaaggcgggcgcggcgaccgacacggccctgcgcacgattggactacgcatggccgaagacctacagcagacgatccgcgactggcctgcggacaactccgaggattgggcggcggtcaagggcttctcacatggcttgatttttacgggacatctgaccaattctattgactcggctgttgtgctgcgcgacggcgactacggcgaggatccaagcccgtgagcggcctgaacctacacgcgatcgtgcgtggcgctatccagacggtcaatcccgatgtaccgggtgacgtctacatatcgactggcgccacgacggccggcggcatccgtacaccgacgttcggcatgctgccggcccaacgcctgcaagtgcaggcgatgtcgcatgaggatctgtaccacctcggcgggttggccttcgcaggcaacatgcagaagctctacgcgtacgggcagtttgccggcatcgtgcgtcccgacggtaagggcggcgacgtggtgcgactcggcaccgaatggtgggttgtccagcacgtgctcgagtggtggcccggctggtgcagcgtatcgatcacccggcaggtcaacgccgcgacgttggacgcgctgacgaaggcgttagccaacggcgcggtgccgaccttgggggtgtcctgatggccgccgcgctacttaccccgaacgaagaccagaccttcgcggcgctgttcgacttcatttccaaggtgctgggcctcccctacgacaccgaccagatcgtcaaggggtttcagaaccttgtcgcgacgccgaccggtagctatgtggtcgtgtccccggggatcatgcagcgtcaggattttggacgccgcggctacgatccggacggcaacgcgacgatcgtcggtgcgcaccagacttacagctatcaggtggactgttacggccccgaaggtccgacctgggcgtcagtgctgcacgctgcgtggcgcacgatgtgggccgtggacaacatgccgtctggggtgctgatgcccctgcactcggacgcaccacagcagcttaacgttgtcaacagcgaaggccagttcgaacagcgtttcatgatccggctgttcggccaggtcaaccagcaagtcacgctgccgcaagactttttcgacgtggcgactttggattccatcattgtcgccgatcaactatgattggcatatccgaccggagagcgtgacccgtggcaaatatccctatttcgcaaatcgtaaccgtcaacccggcggtcgtcagcgcgggcgggccgcagacctcgctcgacggtctgttcctgacgcagtctacggccgtggcgccgggccagctgcagccattctacagcgccgccgccgtgactggcttcttcggtgcaggctccgacgagtccactgccgcgcaggtctacttcgccggcgttctcaatggcggccagttgccggcgactctgacgttcgcgcgctacgctcaggccgcgacctcggcccaggttatcggcgcaccgaccggcctgaccctggcgcagctgcaggcgctatccggtacgctgattgtcacgaccgacacccaacgcacctcgagcgcaatcaaccttgcggccgccacgtcgtttgccgatgctgccgcgcgcatgacggccggtttcaccacgccgaacttcgcgatcacttacgacaacgcgcgcgaccggttcgttttgtcgaccaccgcgaccggtactgcagcgaccacgtcggcgatcaccggcacgcttgcctccgccgtcggactatccgctgcggcgggtgcatttctgcaagccaccggtctgcccgccgatacggccggcaccgcgatggaccgcgcgaccgtgctatcgaccaactgggcgatcttctcgaccatttgggcagcgacgctagccgagcgcaccgcactggcggcgtggaacagcgccaacgggcagaaccagttcatctacgtgggctgggacaccgaagcggcgagcatcgtccccaacaacgcgtccagcttcggcggcgtggtgttcaacactccgtatacgggcaccgtgccgctgtacggcggcctggtgcacgcagcaggtgtgatggcgtgggcgggcgcgacgacctacgacgtggtcgacggacgcaacgcgctagcgttccgtcagctcggcgcaggcgcgacgccgtcggtcaccaacttggtggccaccgcgaacgcgctgctgaccaacggctatacctactacggtagctacgccaacagcgccaacaactacagcatctactacaacggcgccctgtccggcgcgttcgactggtccgacacctatctcggccagatctggctgcgccgtacgctgcagcaggcgctgttcgaaaccctgttggcgtacaactcgctgccctacaacgcggatggttacaacgcgatctaccagggcgcacaggccacgatcctgcaggcgaccgccgccggcatcatccgcgaaggcgtgacactgtcgccgtcccagcgcgcgcaggtcaaccagcaggcgcgcctgcagatcgacgaccagttgtcgacggtcggctggtacctgcaggtcagcgacccgctgaacgccagtgtgcgcaccgaacgtggctctccggtcgtcaaattctggtactgcgatggtggcagcatccagaaaatcgacatctcttccaccaccgttctctaagaggcgtcgtcatggctgctaccctcaccgttgcaaattcctcgatcgcgatcaccgtcgagtcgttgtacccctcgtcggtgctgctgtcgggctacgccgcggacaacgtgttcgagacctcggcggtcgtgaacaaagagacctcgatgggcatcgacggcaagttctcggccggcttcgtctacaacgagatcccgttcactctcaccctgcaagccgacagtccgtcgctcatcatcttcgagcagatctggcagtacgagcagaccaaccgcaccggcctcgatgtcggcatgaccgtgacgctgccgtccaacggcaagcgctacggcttgcagaatggctacatgacgtccttccgggcgccgagtggccagcgcatcctgcagccggccgcgatcgagttccgcttcggtcggatgacgtttgcgcgcacctgattctcggtgcggtaaggcaagaaacaacaaagcccgctttcgcgggctttgttgcgactgggctctcccggtcagtcacgtgctggctgcgccttgcggcgctgcgacaacacgtttattcgacgtgtcatcaaatccgggccagcccggcgaggtgcttgtagcgctatcctgtagcgctatcccgatgagcaatgcgcggacgcatcttacaccacagcgcacgtgctggggaactgcgaggacgttacttgccgaacagttccaggcaggcgcgcagcaactggcgctgttccggctgcagcttctgcatcggcacgccagcgatgccgactgcggccttgatcgcgtcgatcgtcgcgacgctatgggccgagatgaaatcgcgtgcgatactcaacagcggcagcaacgcggcgtcggtcgccggtgcagcgtcagtcgccgcggcgatcagcagcccgagcgcttcgtcgtccagaccgggcacagccggcgatgcggcatcgggttcgtcgaccggcagcgtgtgcgtctcggtcgtttccggaacttcgggttctgcaccaggctcgttagcctttgcgttgtcggcttcgatctgcgccttggtacggcgcgggcgcttgggtttctcctcgaccggcgcctccggcgggtcgatatcggacggcaggccatcgccgtcgccaggctccaggatgcggtcttcgtcgggcacgtcgacacgctcgatcttcaagtcattgatgacgactcgcggaccgacctgcaaaaacgcggggttgagaatagcgacgaactccgcgagctcatcgatcgacttgaagttcagctccatgggttactccgtggttgtgggtttgcggcgcggtcgacgcagtgatcgggtggtgtattcggtgaccagctggccgcggtacttcgcctcgtcgcgccgtacctcgtcctgcagcacctgcatgcgctcgcggctggtgacacgccggtagcgcatggtgcgcacctgctcctcggaaatgccgagcaggcgcgcggtgttagcgtgcatgccgatcgcatcggtcagctcgcgcagggtccaagcttcgatcggcttggtgaaatagtcggacgggtcacacgttgtttcgggggcagccatttggtcagtctcgttgcggtttgcgataagttacgcgctggtgcgctaatagtcaacccgccgtagtgttgcggtggtagccgccgtccggcaagtgtcgatggcggaacgtctcgaagttgattagtttgtttgccgcgacatatgcagcacctgcacatcgtcgcgagtcaccctcgcgaagcgattcgtaccagatgtcaaacttacggccacttcgagcgtcgagggccgccccaagttgccaagcgatgtataacgcgcttacatcgtgatgacgccaggcccacggggctagatcgaccggcacgtaccgatcgttcgcgatgtcgagcaacaagtcggcggggtacacgtacaccaggccgtagcgcaccacgaacaccggagtgtcgggatgcaacgaagcgagcggtgcatcgaggggtttgcagagcatcacggctcctccgggtaagtgcagatcatctggttggcttccatcgcgcaccgcgtctggcgctccagcacgtggcgctgcaacggcaaatcaaagtccatgacgtactcgcggaacagcgagtcgtcggcgttgtagacctctacgcgtaccattagcatgtggatgtctccgtggttgtggtgaatcaaacgtaacgcacaagttacggcttgtcaatcctttcgccaccgatccgaaacgaatcccgcagcgtccagcggcaggcccggcgcccaccgcggcgcgacgcgcagccgcgcgagcaactggcccaagcgcacctcggcccggtcgcgcggcacttcgaggatcacttcgtcgtagacgtggtggacgatcttctcagccggcgcgatgtcgagcatcgcctgccagaacagatcgcgcgctaggccctggaccatgttgttcgacaggatcttgcggtctagcgtctcgacgaagccttcgggcttgtcgtagacggcgagcggtgcagaagcgcccggttccagcacgagacgcgcattgtggtagctgatcgcgcgacccgagggcaggatcatgcgcaacgccgcggagtccttgacgaacgtcacctccgagcacatgccgcgcccgatcggcatgcggacctgtcggccgggttgatctagtgcgatcagcaccgcgtactcgagggcggcccaccagatggccatcttggagtggttctcgcggtacttccagacgagtttcttacgcaggtcgtcttccaggtacttgccgtagttgcgcgccatgttgtcgagcgcaccgtcgccgccaccgtactgcagcgacaggcgaacgaccttgccgatctggcgctgatccttatccacgttttcgacaggcacttcgaacacgccgctcgcttcgaccacgtagccgtcgatgccctcctcgaactcgactagcatctcctcgtcatctgcgcaccacggtcccaagcgcgcctcgatgcccgcaaggtcggcgcacaccaacgtgtgctcggggtaggtcgcgcagaacagcgggcgctgcgcgtccgccatagcggctagcggcggcccgacctccggctgcgacaggaaatcgaagtcgtcacgcgttgcggcggcgagatacgcttcgcacgcttcggctttgcggcccgggcggggccgcgccacgttgagaagctgagcgtcaccgcagcccatcgccgtagatcggccggacagtgcgccgtggtagaccgtgctgtgcatcatgcggccatcgacgtgcgcgcgcaggatcgcgcccgacttcttcggtgcccggctcgcgtccagacgcagcgcgagcacgtcgcgcagcgccggcggcagcgtgtcgcggctcaacagccccttgaccgtctcgcgcccggcgtcgtccatgtcctcgcccagcgtcgacgcgaacgcgcggatcttttgcacctcgctggccgatagcagcttaccgtcagtggcggcggtcaactcgtagtcgatcagcgcctcggccaactcgcgcatacgctccataccctcggcgccggccacgtcgcagccgaagccgcggtcgttgacctcgtagtcgagttgccagaattgctgctcgaggtcgggcattggcaccgtcgcctcccacagcgcgaccatcgcgttcgtgtcggtcaacgcgtacttgtaggtatgccgaaagtgctccggatgcgtgacgggcgtccactccgggtgcaccatcaactctttcatccacttggccccctcggtgtctttctgcaccgctaggccgagggctgcgcacgcacgctccagcgagcccggcaagccgttgtatcgggcgcgcgccgcactgcactgcacctggcgcacgtccagcatcggcacttcctggccagacgcacggagagctcgtgcgtgcggcccgttccacatgcccagatcgaacccggcgttatgcgcgacgaagcgcttacgcgcttcgatgtgctggttgacttggcgtggcacgggcttaccgtactcccacaggtcggcggtgcgcatgccgggcagaacgaacgtgaagcagtacgcacgggtcgacggatcgcgtaggtagcgtgccaagccgtggcgcttcaagtcgcacagcgatgcagcctcgaagtcgaggaacagagtgtcggtgttaggggtcatgtgggcttctcgttgtgtgggtagcgcagatgttacatcactgcgcggatgaattgcgccgcgacttcgggaacgattgcattgccgtaaccacgcagcgctgccacgcgggtgggtaccccatgagccagcgggaatgatccgggttcaactggcctgcgctttccatccctgcatccgagccaatcagcacctgtccagaagccgtgtagcggatcggttgcgctagccaagccactcttcccaacagcgcattcgtgggtacgttgtcgcatcgggacccgtccttccaatctcgtgctgttgcggctggccagcccgccagacacgcagccgctgccaagtccggcccgtgattgcgcatcgcttcctgcaacccgccctcgaatgtccgcacgcccttgtcggccagcgccgccgttggcgtgggccacccagtagagtcgctggcggatgtgcggcgcgccgacgcccgcagcgcacagatcggccgccccaacggcgtaggccgcaccttccaggtcagcgcatacaaggtcgagccagttgaggccgtcgaggcttgcaacctgctcgccaaaaacgcttggagggcggcactgttcaatgagccagtggaatgcgggccagaggtgccgctcgtcagcaaacccagctcctttgcctgccgcgctgaaaggctggcaagggcagctgccagtccagactcttcggtctgcgggccacccggcgagctggagggcgagtggccatccgccgatgccggcgaagaagtggcattgtgtgtatccgcgtaggtcatttggggttacgtcctcgatactgcgggtgtcaatctcgcacggtgggatcaatccttcgtctcgcaactcggctaaccacgctgcggctttcaggtcgtattcgttgaggtagttcatgtgggccctaaatcctatttgtaagccggatcatattggaaagtcgccatttgtccgtcacgcacaaatcgtacgtgagtgagccaaacaagtccatcctcgaacttggtgaacgtgatctccgtcggttgcgggatcaggtcgcgctgcagcaacacgcggtgcggctccttcggcagatcacggcccgtcgatacctcgaagtatttccgggcctgggcgaagaagcggttatcggcggtgcgccggtcgaagtccagacgcagctggtaggtgccaaccgccgtctcgtagtggaatgtgaggatgctttcgccctcaggcaccgagtaggaatggtccaccggaacactgcgggtctccacgcacagctcgtcgcgcaggatgatcgaatcctcgtcgtgcaggtcgtagctgtctccgatgccggagtgcgggtcttgcggttcgggcttgcgcgactgggtgacgaacccctggcgcggacggttgcagtttcggcacgtcatgtgctcggggtcgtttaggtagccgcacccaggctcgtcggagtccatcagccccagcacgacgcgcaagtcgcgttcctcgatgtcggggctgggtgtcgggaaacggatgccgctgcgctcgcgctggaccgcaatccctggtgcatccacgcgctcggcgctgcactcccacaagccggcccgtgagtcaccctgttcgagatccgcattgatcgggccgagccggtcgaagttgccgccggcgtccagcaccaagcagttctctttgccggcatacgggcgaaagccgcgcccgacgatctgacggaacaacacctgcgagcgggtggcgcggacgatcacgatcgcgtcgacgaacggggcattaaacccggtcgtcagcgtgcccaccgacacgatgtgccgcgtttccttggccaggtattcgcggataccctcgacacgttcgcccttgtcgagatcgccgtaaatcagcgtcaccgtctcgccggcagccaggagcgcggcgcgcatcatgcgcgcatgttcgacgttgacgccgaaccacatcacgtggtcgcggccgaccaagttttccagaccgacggcaatcacctcggcggtgactttcatcgcagcagcagccagctgcttctcgtcgaaatcctcgcccgaggtcttgacccccgcgacgtcgatctgcgggaagcgcaccgtcggtgcgacgatcggtgcgatgtagccctcgcgcaccaagcgattgaacagccgcccggtcgtcaggtcgtataccttggcattgaacaatccgcactgcgacagcggcaccgtcttcacgcctttctgacggaacggcgttgcggtcagcgcaatgaaccgaacgtgcgggttttgctcgcgcgcaccttcgaccagtttgcgaatcgacggcaacgacaggtcgaagccgtgcgcctcgtcgacaatgatgtagtcgatcggcccgaaccggcggatctgacgccacaccgactgttgcgtgccgaacgtgatcttgcgctgacgatccttacggttgagcgcggcgcagtatacgccgatgcccgacacgagggttgcagacaggtatgacgacgcttcgtcgcggttctgcccgaccagctcttgcgacggggccaggatcatcacacgcgcgctgggctgggtggctatcagtttttcagccagcatcgcggcgaccagcgacttgccgccgccggtgacgatcgccgcgatggggtgcacgttacgcgcagcttgcagagcggcgacaacagcattcgccgcctcgtcctggtaccaacggggcgtctttcttgtctgtgagggcatgggcgtggggtctaaggttaaacgaacatgacccggatgttaccgggtcatatggagtcagtcaataacacggggtggccggcgtcgcgtaggcgcgaatgcgacgcacccaatacgcatgaccttgcggtgtcggtcgccacacaaacgcgtggcgcaagctgtcgcacgccaaccctcttggcgatatccatcacagggccgccttgcagtcgcggatcagctgttcgagccaagctgcgcgagccgccatcgacgcattcgcccgaaagccctttcggcgctgccactggcccaaaaacatagcagggccacccagcgcgcggccgattagattgcaacaatcgttccgtgcatgggaaaaacgcgccccgtagcgcacttcactcgccgcaccaagggcgctacaaataccggccccgcggcgaatagcggcgggtaggtatacttttgcgtcctcgaaaagttggatcatcgcccggatgcgggctttctgctcgtcggtatactgaatgtccatggtggtatgtcctgtgggctgtggtgattaacgcttgactttcttcatgtagccggtgcgcggggcaggcttgccgctcggcatagatcggcttgatcacccgggcaagcgcgccgggattgaacgcgcgccaagggtgactagacttcggcttggtggcggtcatttgactgccccgagtcgatcgatacagtccgccgtagcggcacgcttgttgtcgcgatcgacgatcgcgtaagccgcctgggtgtaggcgccgacccagtcggataggtcagtcgacacgggcggcggatccagcgcaatcgcggcggtccgctgttcgcacagcacacgcgcttgcgcggcttgcttcccaggcacggagcgcgacgtcgcgcatccgctggaaacgctcagcgtcagtagtagcaggatcagtcttaacatgggcgatttcctgttgggcattggtcagttgggtccgggtgtcggtggtctcggcgtcgacgcgcatgcgaatgtcgtagccgatggtgatcgcctcggcctggtaggccaccgcttctttggtgacctgcaggtcggcttcggtggtcgcgtcccgtgcccccttggcgtacagccagtacaggccgcccaggaccgcggctacgaggacggtgtagatgatggcgcggattgggatagggctcatagcttcgggtccaaataacgaaaggcgagcaaacctgcgtcgacgatgccccttggcggcaaagtcttggcgaaatccagtatccgccgcagggcttcgagggtctggaatggcaaaactatcgctgcccggtcgtcgtggatatggtcgctcatggtcgatccagtattttcgccaacatgcggtctgtacacccacgacactcgaactcgccatcggtgcgaagtctaaacccggctctgcgcgcatcttctgtcatgccacgcaccgggatgcgccctgcgcgcacgaattcaccgggcccggcccgggcgcactcgtgacacaccggctctacccagaacttagcggcgctcatcgcgcacccgccattccgtaagcgccgcacagtcggcccatcgtgtagtccgcattcgtccccgcgctagcgggcaaccagtcggcctcgacgtccaccgcttcgccgaaccgttctacctgcaccagcaggaagcgccaattctggcaatcgaacacgtaccggccgggcgcccactcacccaacgcattctggtgccgggtccaggcgaggatctgactgtcggcctggcgaatcgtcgaggcttgcacctgcacgccttggccgatcgcatgccaacccaacgggctgacggtctgtgcgtttgcgcccgaaccgagcaacagcgcggccagtgccgcgtaccaacgggacttgagtttcatcaggacaccatgtcgaggatgcgggcgacggtgcgcagagcgatcgtcacgaggattgtaatcgttaggccggtcgccagcatcgcaccgaccagtcggcccgggtgcgggtggcgccgacgggcctgcgggccgcgtggtgcgcggacgccgtacggattggggatcgaggtgttcatggcttatccttgatttcgattagggtgtctagccaattaggtgcacacagtgaagccctaaacggcgaccacgctttgcctcgcacgctcagccagatactggaaccagacacaggtcgcgactcgaatagataccagcgaccatctgcgtcttgtgcagcccactgcgcccaatccggcacatcgacgggcttaccatcgagaaccagaatcccgggcgccacctccacacacgctacgcactcccccgccaacgcagcatatgctgctaggtcgacgtagtcgtcgagcttgccggccgacgtggcgaacgcccgggcttgtttcagtacggtcatgaacagccagccgtcgcgctcggttagggcatacccagacagcgcgttgaacgcggcgacggtgcgcgccatcgagcgttcgccgcccggctggtcgcgctctgcggcgcggtcgtcgatggtctgcgcggactggcgcaggatgtcggaagcggtaggcatggctcaagcctccagcttcgacaggctggaaaacaacgcagctcgttcttcgatccacgccgccgcctccgccgccgcccgcgccgactgcgccgccgccgactgtgccgaccgcgcagccgaccacgcctccgccgtcaccgattccgccgccgattccgccgccgactccgtcgtcgactccgccgccgactgtgccgactccgccgccgaccaggccgaccgtgccgccgaccaggccgaccacgcagccgaccaggccgactccgccgccgagcgcgccgagcgcgccgccgagcgcgccgactgcgccgccgactccgtcgccgaccacgctgccgactccgccgccgactgcgccgactgcgccatcgccgactgcgccgaccgcgccaccgaccaggccgaccgtgccgccgactccgccgccgaccacgccgactgtgctgccgactgtgctgccgactgcgccgactccgccgccgactcgacgccatccacacctgcagcgccttcgtggaatcggcggccaacctcgagggcggagacgacctgtgcaattgcgtgagtaacttggtcgggatgatcggccaacaaggcggcgcgctgcgtcaccagcatcctgtcgattcgcgcaatggcgatgagatgcggcagcggggccaggtccacgccgaccgggatgcgctttgcaagctcgacgtggaagctgccacgctcagctgccggcaagccctcgaacatcgagtcctgcaggcggatcaaccattccggcagggcgcgcgcatccgccacggttgcgtgaaagctagtgctatccgggtcgatctcgtgagcgaagcagccgaccgagcagccgcggaattggccgtcgtgcatctcgccaaacgtgccagagaccagcatgtcctgtgcttcgtgccgctcagcctgagcaacgtgtagtgccttgagtgccggatcgttattgaaagaaagctgtgccatgtggctgtctcgtcgtgggtgtgggcttagtatgtcacttacggtttacttctgcaagcgcgttttcgatgtcgcgcatcacagtatcgatcggcaccgtacggtcgtagatgccgatcggcgtcccgcccgggtgcccgtacagggcgtgcgcggtagcgccacgttgtgagacgcaaatcacgtaccggccgtacttggagcgcatatgggagattctggcgcgcattaggaccgccagtgccggtcggcgtttcgcgactgcaccccgaccatcgcggcacgcgtcgcggggtgacgactgaaagcctcgatcagcacatcgcgggtgtacgacttctcggatgaccaggctttgccgacgaccggcaccacgccagtcggacgcttccagatcctgacgaccaggctgcagtccttgcctagcctggacagcgtgccacggtcgagcgtgacgccggggagccactgggccgcctgttcgacggtccacatcggttcttgcgtgaatgcattcattgtgggcaaatcctctgtgggttacagggtgaacgcgcagccgaccagtgccagcagcgacagggcgacgctagcggttgcgccgcaggtcatcgcagtgatcgtgcggtcggcattcggcgccacgaaggacagcacgaagccgaggacgataaggaccagggcgatagcgccgaaagctacggggatcaagatcggatcgaacatgtgggtgtctcgacggtgtgggactagaatcccacatgctatcccccatgtcaaccaaaagttacatcgattttaactatcgaatagcgccaaacgggttgatcggtatgacgttgtcttcggcaggctcccaaccctccggggcgcggtagacgcgcaagccacgtgcgtcctgggtcgcaacccacccgcgcgtcttgagccacgcggcggcctggcgcgcgctgaacttacggcccgagggcgttgcgtccagcgcggtgcgaatctccagcgagccgacacggcccgtctttgcgccgaatttactcaggatcggcggtagcaggtcgtcgagatccgaatcgaccgtaccgcggcccgagcgcatgtcctcggcgttgtacgctttgaccagctcgggcaccgaccgtaccagcttggtgtactcggcccaggaatcgcaaaaacgggctttggcttcggccaggatctgcggcaactcgacggcccaatccagcgggggtgctgtctcgcagagcacgggcatgaagcggctgttgccggtctcgtcgcgattgagctcgtgtttgtttgcggtgccgaacagcacgtaccgccgtgggtgcgacacctcgcggcgatcgtacggtgcgcggtagacgtcctgcgtgtcggttgtccagcgcttgacgtcctcgacctcgcgcttgcccaggcccgacatttcgcacaactcggcgaccggcgaccgcgcggcggccatcgccattttgcgatcctcggtgaacgcaatttccgagggtagcggcacgcccatcgcctcggcgatctgcacgccgaacaggcccttacccttgcgttgctcgccaatcagtaccggcaccaccgggcacggggcgccggggcgcagctggcgcatcaccaagccggcgaagaagacctgaccggccccagtcaatgccgggctgcctggcgtgccgtacaagtccgtgaaaatggtatccagacgggcccgcttgtcccagacgggcaacgacaagacggcgtctttccacgggtcgaccggtcggccgcgtgccacagtctccagcgcggtttgcaacgtgccgactgaaaccgtggaggcgccaagacgggtgacagcttcgagccacatgccgatcgacggcaagtcctcgtcgttgagcttgtcggcgcagacgtcgtaggtgagcatgagaccggcttcacgcgcgagcagcttggtggcgaacaccagattctgcacgctgctgtggcgtttgtcggcgcggtcgggccattcctcgatcgtgccgcacagccgttcggccgcaagctcgagcgggtgtgatagctccgacgcatccgactccccgaaggcaaagaaatcccccagcttgtgcgaccacacgcccttgacaccgcgcagcgtgaccacctcggcggcgcgcaaatcgccacccgacaaatcgtgtcgggtggagtcgaacggatcggcgcaccgccggccagtggcttggtcgaaatgacgcattgcatcgccgaccgtcatgcgcagcggttcgggcgtgtgttcgaacaccagcggccaggacggcgggagcaccttgtcgcccagcgcgcgcagcgcaagagcgcccatacggtcgccgtcgtcgcgaccggccgctaacgcgttggctttgtggtagtccagtgcaacgcgcttggcctcgacgcgcatgttgttcttggcctgacgcaccgcagtttcgaaacgacgaatcgcgatatcacgcaccgccggcatctcttggacgtcgagaaacccttcattggtgcggtatttcgcgctcttggaggtatccgacgaacgcgcgacccacgcatgcgcgtcgggcacgttgcgcgcgatgccgtcgtttagcacgggtgccgcttcgaacatcagccgggacggttgatagaccagtgcgtcggaaagctggcgcaccagcaacgcgccggagcgcgacacgatgatgcggccgcggccggcggcccattgatcgatctgcagccgttgcgcaagcgcggggatgtcggtgccacgggtgacgccaaggtagatgtgaacgccgcgcagtccgcgatcggcgacgtacgaggatgccgaggggcgaccgacgcgcaatgcctggcgcagccacggagaagccgactccagcgcgtccatcacttcctcgactgagctgtagaccgaggtctcggtgtcgacatcgatcaggaacaaccccggggcatccgagtagcggaacgcttcattggtccgagccaccgcgtgtgggttgaactcggagccgcgtcgagtcgtgagcggcgtgttgccgacgatcggcaggcctgccgtgatcgcgtgatgcggttcgaggttgtccagaacggtgcgcaagtccagcagtgacgcgacttcgcgcacttcggcgaagccttcggtcatgtgcgcgattgccgagctcgtgaccttgccgtctttgagctcgaacgacttggccaactcacaagacgtcgaggtgatcagggtgaagcgaatcgggggtgttggggcgtggtcaggcatgtggtcgctctgtcatgtgggtgacgggtgtgtgcaggtcagtctgcgcttggttgtggggggctgtccagctctgcgccgactagccacataaaacgggcagtgagcccgagctgacgtcgcgggtaaccagcggtacggagtgaacgtccggtcgcgatggcctcgcctttggctggtgactgtttgcggatcagcaaaaacagctcctgcaccgagaaccagcctgcgttggtagaaccgaaggcagccacctcggccagcgtgagggggccgccggctttgttgggcttctcgaagttgacggtcaacacgcgccacccggcctccgcgttgacttcctgggcgtacatctgggctttggcgacgatatccatgtggtttcctgggttgtgaggtgcagtcgctaccttacatatccacagggcagttgtcaacccaaggtcaactattcacgcaatagtgaaccaaacgtactagatgccagaggataaagctcttaattctctatatttaatgccaatgaaaaaaaggaaatttaagtcgatataattcttttgatttcacgttttagatatagagaggtttgttggtactttgcgtctgttcctctgcgtcgtgtacttttggttcatgtggtgcgcgagcgtcctctagcattgacggggtccgcagcggcaagtaacctcgcgcgcatggcaaacgacacgctcgcattggacccggcagtttgggatctgacactggacgcctacggcaacgtcgcgacggtcggagacgacaccgcgcaagacgtgcaaaccgggccgggcctgcgcctggctcaagacgtagcgacccgtacgcgggcctggcgcggcgaggtctacttcgacaccgcccagggcatcgactacgacgcgtacctgggtacagctccgctggtcggccagctgcaatctgactttcaaaccgaggcactcaaggtgcccgggtgcgcgacggccttggcgaacttcgacctggcccgtacgccgcgagtgctctccggcacgttgctgctgtcggatcaggccggtaacggtgcgcaggtcgcggtatgagcttgcagcagattcccgtgcagcaaagcgcaaaccaagcgttctccgtcgtgctggatgaccgcaacgtacagatgacgctgcgcactacggaaactggactctacatctcggtgctttccgacggcatcccagtggtgactgggcgccgctgtctggaccgcaccaacctgattccgtccggcgcctatctgggcataccgaacgcgttgttcttcgccgatctgcaaggtgaagcggaccccgtgttcgcggagtttggcacgcgcttcgttctgctttacggcgacccggcggcaaatggggcgacagtcgtgccgacgcgaccctcaggtgcgacggcgcgcccaattaacgaaatggcactgctctatgatggcgcagcgtcgtacaatggcgagtactacttcggagcaacgtagtgtcaacgatcccagaattcccgggcagcgttccggtgccgatgatccaaccggatgatcgggtacttggcggacctgcgggggctgcgaacaagcaggcgattgcgctgatggaaaatgccgggatcctgtacgacacagtgaccgccgcgacccaactcgcaacgactgctgcatcggcggcccagaccgcagcgactaccgcatcgacggcggcaagtactgcgaccgcggcggcaagtactgccagcgccgcacagactgcagcccaatcggctgcacaaactgcgaccgcggcccagaccgcagcgggcgccgcggacagcaaagcgaccgccgcacagacgcaagcgggtgcggcagcgacgacggccggctcggcagatagcaaagcgacggccgcgctcaccgcggcgcagtccaaatcgacgcgctacgacctgggcactgtcaacgtctcctattccgcggccttggcgctcggcgcgggcgctcgtagtgtcgttgtgccctgcccgggcgccatggtcggcgacgcggtgttcgttgcggcaactggtgcgattccggacggctacgcggtcggcgccgcccagtgcctcgtcgccgatacgatccgtgtgtcgattgtgcaccccgccttggtcctcggggcgaatttcacgatcccagtgaaggcgttcgcactgcgctaggcgcttgacaaccgcgcacgctgcgtgcaacctgtcgttgccgcaaatgtgggcggtccgtgggtgtggttgggccggggcgtgtgggcgccccggcccattttatttggagccatgccgtgctcaagcaactcacagtcaatctgaccggcgctgatgctgggcgcccgattaccctcatagagcgacctgcgctcgtcgcagaccgtctagcgcgcgctgcattggccgaagcaggcgcgcctctcgccgggggcgtcatcggcttggtgttcgagcacatgggcgcagtgcgccagctcggtgagcgatccaacgcactgctgcagccgttcgtagacgccgaccggcagccgttgggctgggagaacgtgttcgtattgcaacaggccgctttgctcctccatgcgggattcgtcattgaccggcctcgactggaagcgcctgttgccatgcacgtcgccgggattcagcgcggtgacagcgacgttgcggttcacttctgctcgtcgcatatcgccaccgtgctacactccggccacgccacgtaccgcgagttagaaaccgtactcagcaccgaggacgtgttcaacctggtggaactggtcaacgtcgcggccatccgcgattggcatgccctacagtcgagcaacccatgacccacaccgacactcgagacttgacgatccgcgct

SEQ ID NO: 36 - DNA, 44408 bp, unidentified
  misc_feature 1..44408: note = the genomic sequence of a bacteriophage
  source 1..44408: mol_type = unassigned DNA
cgctgcgcactacggaaactggactctacatctcggtgctttccgacggcatcccagtggtgactgggcgccgctgtctggaccgcaccaacctgattccgtccggcgcctatctgggcataccgaacgcgttgttcttcgccgatctgcaaggtgaagcggaccccgtgttcgcggagtttggcacgcgcttcgttctgctttacggcgacccggcggcaaatggggcgacagtcgtgccgacgcgaccctcaggtgcgacggcgcgcccaattaacgaaatggcactgctctatgatggcgcagcgtcgtacaatggcgagtactacttcggagcaacgtagtgtcaacgatcccagaattcccgggcagcgttccggtgccgatgatccaaccggatgatcgggtacttggcggacctgcgggggctgcgaacaagcaggcgattgcgctgatggaaaatgccgggatcctgtacgacacagtgaccgccgcgacccaactcgcaacgactgctgcatcggcggcccagaccgcagcgactaccgcatcgacggcggcaagtactgcgaccgcggcggcaagtactgccagcgccgcacagactgcagcccaatcggctgcacaaactgcgaccgcggcccagaccgcagcgggcgccgcggacagcaaagcgaccgccgcacagacgcaagcgggtgcggcagcgacgacggccggctcggcagatagcaaagcgacggccgcgctcaccgcggcgcagtccaaatcgacgcgctacgacctgggcactgtcaacgtctcctattccgcggccttggcgctcggcgcgggcgctcgtagtgtcgttgtgccctgcccgggcgccatggtcggcgacgcggtgttcgttgcggcaactggtgcgattccggacggctacgcggtcggcgccgcccagtgcctcgtcgccgatacgatccgtgtgtcgattgtgcaccccgccttggtcctcggggcgaatttcacgatcccagtgaaggcgttcgcactgcgctaggcgcttgacaaccgcgcacgctgcgtgcaacctgtcgttgccgcaaatgtgggcggtccgtgggtgtggttgggccggggcgtgtgggcgccccggcccattttatttggagccatgccgtgctcaagcaactcacagtcaatctgaccggcgctgatgctgggcgcccgattaccctcatagagcgacctgcgctcgtcgcagaccgtctagcgcgcgctgcattggccgaagcaggcgcgcctctcgccgggggcgtcatcggcttggtgttcgagcacatgggcgcagtgcgccagctcggtgagcgatccaacgcactgctgcagccgttcgtagacgccgaccggcagccgttgggctgggagaacgtgttcgtattgcaacaggccgctttgctcctccatgcgggattcgtcattgaccggcctcgactggaagcgcctgttgccatgcacgtcgccgggattcagcgcggtgacagcgacgttgcggttcacttctgctcgtcgcatatcgccaccgtgctacactccggccacgccacgtaccgcgagttagaaaccgtactcagcaccgaggacgtgttcaacctggtggaactggtcaacgtcgcggccatccgcgattggcatgccctacagtcgagcaacccatgacccacaccgacactcgagacttgacgatccgcgctactactggccgcgacgacggcaagtcgttcattatcgccgagcttttgccgtatgacatggccggtttcatgctgcgcctgatgtccgcgctgcaggtacctgacgtgtccgtgatcaccgactttgtcgatgcggccaagcaagccaagcaagacggcaaggcgatggacgggacgtcggtcgtagagaccgtcgtgcagctgatgatgggttgcgaccccaaggcagtgcacgcattgatcggcgatatcctggcgcacgtcagtatcgcccctgacccaaacaacccggtcgcagtgcgtcgcgcgactgcggtagacatccgcgagatggccacgctgggtcagatcatcggcgggttcttcacggccaacatggtcaagagcgcgtaagccgtggcgctatcgctcaacccggttgcggtgttcaacgcgacggcgttgttcgccaaagcgtttccgcggatcagcccgccacaggccatctacgcggttctaaacgccgataccgcgatcccgctgacgatcccttcgcagtggatcgaagtcgcgccgcgctacgaggcacaggtggccgactacccaatcgagcagggcggcttcgccgcgtacaacaaagtgcgccgccctcggacgatcgatgtcgtgctcggcaaagggggctcggatctcgcccgcttcgcatggctggccgcaatcgagcagcaagaggcgaataaccccctgcagctgtacaccttaatcaccccgcaaggggtctacgccgactacacgatcgtgcggatgtcgcaccaaacccggcaagaccgcggctcgaatattctgtacctggagatccaattctcgcaggtgttgcagatccagtcggcgcaggatgcggcctccaacccgctagacgccaagtccgggccggtcgcacagctcgggcgggtctactcgtctgtcgtctctacagccacaacagcgttggccaccgccaagcgctacatcggcggataacgtatggccagcactgtagtcgacgagctcgtcgtaagattgaccctcgatgcggagccttacgaggaagccgagaagaaagtagatacgcaagctagaaccaccgagcgcaaggtgcgcgaacgcaccgatgcgcagaccaagcgcgacaaagaccagctgcgacggctgcgcgataacggcgcgagcgtcaaggcgttcgcggcaaccgttctgaccgcggtcaccgtcatgggcggactcgccgttgctgcgggtggggcgctgaccaacctactcggcttcgagaccggtttgcgccgccaggccgtcggcacctcgttgtcgaaccgtgagatgcaggcgtggggggcgacggcccggcgcttgggcgccgatgcagacgccggcgccgaggcgatcgccgcgctcgcgcgcgagcaacagcagttcaacttgacgggcaacgcgccgaccatgcaggcgcttgcgcgcctcggcgtgcgcgtcggaaaagacgtcagcgtcggcgacatgctcggccaggcgcagcagatctaccgaagtgccgcgccggaacaacgccaacagatcgaaaacactctgtccgcgcagggcgcctctgccgatttgatcttgatgatcaagtcggagaaagacgcacgcgccgaatatgcgcgatcatttgcccaggccagcgacgaaaaccgcaaggcgctcgatgcccttgccgactccctggagtccatgaaggcacaggcggtcagcgtcgctacggtgctgctggacgtactgcaacccgcggtcgaatggggtgcggtcaagttgggcgagttcgcgcgcgacgtgtccacgttcgccggtgaagtgcgcgacgccgggggtggcgtcgatgccttcgtcgatgcgctgaccaagcgttcggacaacgtgtccgagttcgtgcgagggctggagcacgctgcgatgcggtttcgccagatcggcgacgtgttgagctacgtgctcgacaaggtatctacgtgggctacgtccaagtggctccagtttctgtccggaggtaacggacagaacgggaaggacgtcagcgcaatcgccaacatggcgcgcaccggggcccaggcggtcgccagttgggcgtcgaacacctgggcgggcgcggtgggtgcagcgcgcgaccctggacgcggcttgccgcgtaacatcgagaacgacactgccgacggcttgccgcgcaatgtcgagaacgatcgacttggggcaaagccctcggcgaacgcgcagcaattcatggaaacgctggtcaccaagcacggcttgacggtcgcccaggccgcggctgtgacgtccaattggcaaggcgaatcgtcactggatcccacggcttacaacccggccggtggcggcaccggcgcgcgggggttgggccagtggcggggcccgcgcaccgaagcgttcaaacgcatgtacggcgtggatcccaccaaagcctcggtggacgagcagatcaacttcatgctcaccgatccctatgagcgccagctatgggaccaagtcaagcgcagcggtggtgacgacgcctaccgactgggcggcgaatactcccgccgctacgaggcgcacggcaacgttgcagaggacgcccggcgcgcacgaaatgcacaagtacttgccgatagctacggcgggtcggcgcaacgcagcggaaccggacagacgacttcggccgcgactgttttcaacattcagaacgtcgaggtcaaggcgaacaccccgcaggacttcgtcggtggtattcagcgcgtgaccggcacgcaaaaccatgttggggtgatgcgttgaacccgttcaaagaacgcaaggtgcaggtcatcgtacgtgtgcagcgccccgacgccgagggcactgcgcaagacctggaatacgcgttcgagcagcatcggatgtcgattactgtgtcgcaaggcggcaagcaattcggcaacgcgaaagtagtcatatacggtgtacgcttggacgccatgaaccagatcgcgcgcctgtggctcgaagcactgacgccgcaagcgaccgatatgctggaactcaatgtctgggatggccaggcgtacctaccgttcttctccggggtgatcacgtggtcgaccgtcaatgcctcacagcagccgcaggtcgctctggaaatcgaagcgaacgacgcgatggcggggatgatcgcaaccgcaagcccctacgcgcaagagggcccggtcgcgctgtgggatgcgcttaccgcgatcctggaacccgtcggattcgtggtggactacgccgacacggtgcccgatatctacatcacccgggcccgcgtgaccgggacgccaatcgaacaggcagggaagctgatggcctatttcccagatctgacgtggcacgtcaacctgcagcggttcattgtgcgcaacgcaaacgagccctacgacgaaaacgcgatccccgtcgccagggagacgggcatggtggggtatccggtatattcgaccagcgggttgtcgttctccacgttgttcgatgcacgcattcgccccggcgtgccgctagacgtacgtaccgagttcgatttcgtgaaccggacgaagtgggttgcatcggtgttgcagcacaacttgcagcccaatacgccaggtggggcgtggatgaccaacatcgcagccaattcgtttggcactaaggggaacaccgatggcgcgagcgcctaaaatcgacgccgcattgtcggcggtgatcgacccttcggacttcgtggcgcggttcgcgcgcgctggatccaacatgcgcacgcaggtgtttcgcgccgcaagtggagccgaggcgctcgagctcgcaaacgccagcatcgccgggttggattgggagttagtcgaattgctgacgctcgaagaagccaagaagcggcgggggctgtgatggccgccccaaagctgaacgcgccgttcgagacacaattcaacgccgagcgtgcacaagagttcatgatcctgcgcttgctgcgtcagatccacaccgccgatgtggttaaggtgctcgccgtctacccgaccgccggaactgtggggttcgtggacgtgcagccattggtgcaggaccgcgacaccagtaacgtggtgatcgcccaaagcccgatcttcaagttgccgtacctgcgcctgcagggaggcacctcggcgatcatcttggaccccgcagtgggtgatctgggactcgcagtcttcgcagagcgcgacatcaccaacgcggtcgccacccgggaagcgggcgccccgccgacagatcgcacttatgacacgggtgacggcctgtacttcggcgggttcctcaatgcggaccccacgcagtgggtcaagttcactcaggccggcggcatcgatatcttgtcgaccggcgatttgaacctgcaggccgccggagcaatgaccctgcaagccggcggtacgctgaccatgaccgcggcaaacgtggtgatcaatggcactacgacgttcaacaacccgataatcgccccgcaagccacgatcggtggaattcccttcaccacacatcgtcaccccaacggcagcccgaacaccggcgcgccgatcgcgtgaaacgctgataccatagaccgatgagcacaaacgtccccctgccaaagtttctgccaaccggcttgtcggtgccctcagagccggagattctggcgggggtgcaaaccgactggatccacgcgtttgccctgtcagggaaagcactcaacgccgagttgaccacgcctcaaggtcagctgcagcaaacccaagcgtttattttggcggccatcaatgcgcagctgctggagctggtcgctaacgtcgatccgatgaccagctctggcgcctggcaagatgcgctagggcgcatctacttcctgacgcgacagcctgcgacctacgctacggtgcaagcgaccgtacgcggcacagttggccaagtgttaccgctcggagcgcaggcacggtccagtgacggcagcttatgggcatcgacccaggccgtgacttttgggacgggcggggccgcgacggttgtgttccgggcagtgcaaatcggtgcaggccccgcggccggcgtcaatgacttgacgatctaccagcagcagacaggttgggagtcgatcagcaacgcgacggggagcgtgccggggttggatgtagagtcacgccaatcgttcgaggagcgccgtgcgtcatccgtcaacatcggcggcaacggcacggcgagcgcggtgcgcgctgccattgccaacgtgacgggggtgaccgatgtctttatctacaacaacggtagcgtcaacccgatcaggtatggcgcgacgaactatccgatcccggcacacagcttgggcattagcgtcgccgggggcgcagacgcggacatcgctgccgcaatccattccaaactcgactgcgggtgcggcttgccgaccgcccccggtttggggacattgatcacgcagctgatcgaggattcggaattctatgccgagccttacccgacgtatctgattcgcttcgtgcgccccgcacctgtgacgatctacgtcaccgtgaacgtcgccaatctgtcgacattgccgagtacctacgtgcagagcgtgcagaatgcggtcgccacggcgctgacgacggggtttgcgactccggacggctctatcacagtggaccgagcccgaatcggcggtcagatcgtcgccgcagaatacttcgccgcagtactggcgctacgcggcagcacccccgtgtcgattttcattggtacgagcccttctcccaccagcggcgatgcgttgaccatgggcatcgatcagttgcccgtctgcaccccgctagcggtcactgtcaacgccgtggcggtctgacgtgaccgactatctgcgcactgtcatgaagcagtacgccaacagcccgatcatttcgggactgttggcgagcttcgacgagtggtgcgacctgtcgcggttcactgccgatttcctctacaacctgtgggatatcagcaccgcgacgggctatggcttggatgtctgggggcgaatcttaggccaggatcggtacttgcagattcaacaagtaccgggtaacaacttcggtttcaatatcaacgatgcggtcggcacgcaatggcagccgttcaatcaagccccgttcttcaatggtgccgctggcgggactactgcgtttgcgctagaggacgtgtattaccgcaagctgctcttggtgaaggcggcgtcaaacatcgccagttgcgactgtccatcgatcaatgcgctcatgcgcgcgatgtttggcgatcgcggtaagtgctacgtcggctacgatccgaatcagccgatgatcatcggctaccacttcgagttcttcccgacggccgtagagcggtctatcattgaatcgggcttgtttccgcagccggcaggcacaaccgttcgtttcctgtacaaaaacctcacgtacgcgccgttcggttttgctggtgcgaacactggtgcgaatcctgaatacgtgacgggcttcaatcaaggcccgttttacaacaatccgtaaaggcgacttaccatgcaatctaccggccggccaaccaagttccttgtgccttttgccaacaacgactccgcgaaagtcgagctgccgctgacgacggccgacgccacgcgcgcttcgttgcgcacgggttttccaccactgaccggccagccgcccgaggccggcggcgtgcctccgcagttagaagacatgaacggcggactcaaccagatgagccggggcgcttggtggccgatgctcggtggccggtggccgtatgacgcgacctttgctgcggatgcggcgatcaacggttacccccagggcgcgttgctgccgtctgcagatggcctgggcaattgggtcagcaccgccgagaacaacactgccaaccctgacgccgacagcaccggctgggtgccaggcgcgttctacggcgcgaccgcgctgaccaatcagaccggcggcactgtcacactcgtgccggcgcaagccggcaaacgccgcatcacggtgagcggcacgctgacatccaacttggttatcgtcgttccgaattggatctactcgtgggatttcatcaacacgacgagcggcgcattttcaatggtagtgcgtaccgccaccggggctgcggcagtagtggaacaaaacggcgagcgtacgccggtattttgtgacggcaccaattgcacgttgggcagcccgaatatcgcccaagccacacgcccaacccaagcgatacggttcgatcaagctgtgggccgtctgctcaacgtacaacgctttacggcgagcggcacgtacacgcctacccccggtaccgctcgcatcgtggtagagattgtgggcggtggcggtgcgggtggcggtgcccagtccaccaacaccgcggcggcggtcggttgcggcggcggcggcggtgcgttcgtcaagttcatgctgactacggtacctagcagcgtctcggttgtgattggcgccggcggcgccagcgcaaacggccaaggtggggctgggggtacgtccaacttcggcgcgtacgcggcctgcagtggcggtggcggcgggcgtacgttcggtgcggactccagcattcctaattttggcggcgaaggtggctccggcggggatacagcgaccgtgggtgccggcgccgttgctctggttgcctcttcgggcgcgtctggaggtgccgcaacctcgctcggtgccggtgcttacctgacggccggtatgggaggtcctacgtatttcggcgggacggcaaaaacggcaaacacgactgcgggtgcgagtgcaaaagcaaacaccgggtgcgggggctccggcactacggcggcatccggcgcggtgacgatcattcaaggcggcgccggcgcggcaggtctatgcctggtgtacgagtacgcctgaccaaagagaaacccgccgaaaggcgggtttcttgtttactcggtgtcggcctgcgactccaaggcttcaatcgattgcaagtacgcttgcgcgtcagccaccgaggagaactgcgccaaggtggcgtccttgtggtcaaggatcgctgcaccagttgcggtggcggcgacgcgtcgcggacggatcggcggggtcaggatgataatcgtgctcacggcttcttctcgtttagctgctcgggtttgagcgagggggccagcgcgtatatcgcggtcaggtgatcttggagccgatcgactttgcgctccagcgcggcttggcgcactgcggcttcggtttgtcggccgccattggcgatgttccagccgaagaacagcgcggcgatgaccaccacgacccacatcgccgtcgacggcccctggccgttgatcgtcgcatgcccgccgttctgacttccaaactgccgggtcagcaggtcgtcgacgcgcgtgatgagctgttcgcgttgttcgttctggtgttgctcatccatgctgcatcgctccttcaagtcgatcgagtagtgagttgatgcgcaatacgtgcttgcccgtcggctcgtcacgtgccgcggcggtccgtaggtccagcagggcgctctgcagttcggcgcgaatcgtcgcgatttcgagctgccgggccgccacgcgctccaaagcgaccacgatgtagggcatgacgcgcatgcactcatcggcgcgcgaacgcatcggcatagcgatggcgcgacgacccctggcgatcagctcgctcaactcgctgttcgacggcgccggcttgccacggtatttgcgctccagccgttccatgctcaccacccggcgaatgaatcggcgccagggctggtaatgccccgcgaatacgaacatgccccagatgccccacatcagcgcggatccgcgccaggtgtagatgttgccaccaactgcggcggccatcagcatcatgaagctgataaacgtcacgatcaggtgcgacagcccttggaagaagtcgatcgcgccgggccaggtcagtgcctcgcgcagcgtcggggatcgcacagcgttgagaccgaatagcgcggtcagccagatgccagcgagcgcaggaatggcgaccagcgaccacacgtgcggcgtgaccgcggcggtgtaagtgtgcagcacgttcagttcactcagcatgcgatgctcccttgttggtggcgcgcaagcgcgcaagcgcgatttcgatcaccaccggggcccagtactgctgcgtgagtgcgagccccatgcccatgacggcctggtagcccgctccgttccatacgtaccctgtccactcgggaactcctaccacggcgacgagcgtcatgataaacgatacagcaaaagcaccaagcagattacctttatgttccacgcgcttgttccacacaccgacaaacgcgccgaaggcaatggccatcagcacgttgaatggcacgcccaaccccacgtccagatgcacccagggggcattcggcgctgcagctgttgtcgcgctggctgcgatgacaagcgcagcaagtgcgttggttgcggccacgaagccccctacgaaaatgaacggtcagagaataccaaacaactgcttggctttggacaacttcgtccggcgatcttctagaccccgaaggccgccattgatggcgcgggtaacgccttcgaggtcgtcggcctgggcgcgcgtccggcataccggcctgcgcaccgtccaataccaaaacgcagcctcgaccgcgtccgggagctccgccaatagctcgggattctcgacgcaccgatcgtcgttgtacttccacgccgaataggccgcatagttgctgcgacccgtgcattggatcagtccgcgacccttgaagcgcgtgccgtcgcctttctgcgtattgccgaggtcggcgcggccctcgtaggccgcgccggatgcgtattcgaccgcggtggcgaacccgtccgattcgtgcgcaagttgggcaatcagatgcgccttctccagcggggatgcgatgccgtgccagatgcaaccatcctcgatcggcttggcgtacttgccagcacccagtttctccgctacggtttcagtgctcatagtcatgcagtcctcagcggccgcgcaggcggctccagaatgcggcgatcatactccggaagcgctgccagcgcgacggacgctttagccgctccgtcacaccaccctcggtagcgaataaccgctgcaacgctccgtgcggcagccccgaggtgccgtgttttgtcacgtacttgtagatggccgcgccggctaccgcatcgtagcgcgccagcgcgcgccgcgaccccagcgtgtcacgcgtctgcgcgacgtggaataggtacgacgtcgaggaggaccgggggtgtacagttgcaccgtcggccaccaggccttcggctaggtactgtttggcctgctgcagcgtgctcgcaagcttacgatcgtccatgtcagtactccacgtacttggggcgaagatgcgctggcagcgcgtcgaatgcgaagttctcggcataatgttcgagctcgccatagtacgatgccaccgcagatgcgccggcagcgctgccttcgcggtggagtgcatcgacgagctcgtcgacggtcgggttcaccagcaccttgccggtgtgggtcaagacggctttcgacagattgtcgcgcagctgttcggccttggagacgtattcgacgtggagttcggccagggaggtcatagtgggttcgatccttttggggtggagggtgcgcgctgctgcgctagcttcggacgcttctggaatggttgtgaaagtgcccaagtgcgtgtattgcccaccgatgctaccgacatagcgccgtccattaggcgcgactgtggcatatacgccagttagcatgacaactctgtgatcaccacgcgcacaaaccccgacccactacaaggccctcgtagaatgtgcagttcgtcaatttggctatcgtctcgccacacgcgttgtttcgtgagcaagtcgcacaacagtttttcgcggttggccaaatcgtaggcgcgattacgatacgaagcgggtccgtgcacatatagcgtaacggcgaggcgcccctcaagggtagtaacacgacccactggcaaagcgccggctgcagctttcgtccaagcgcgcgcggcggccgacagaatgatgcgtccgccaaagacgcgccatattctgttgagagacggaggtaggggtagcactatgtccatcgtggtctcctcgcgaaaccgcccggcgtagccgggcggtgatggtcaccaaggaatttggtcatcgtccaattcgattagcggtgagttggacctactcaccgggccgcgaaagggttcccggactgggccgccgtaccctgggcgaacggattggcgttcgccggcgcggctgcggctgcggctgcggcaggctgcgatgccggagctgcgggttgcgctgcgggcgtttggccggggcgtacgccaaacgcttcggccgaatcgttgccaccagcacgacgttcgccgccaccgaccgacatgagaccgagcagcccgagcgagatgccgcggcgattggtcttcttgtggaaccagctgaacgcatttgcgttcacacgcacgtgttgccccgagaaaaactcggtcttgatgcgtgtggtgttcagcggcgtggcggccagcgcttcgcccgaatccagatacagctccggagcgtattgcgacgacatgcgggcgatcagccagttgtccggaatgccgggcgtgggcttggccatcgaggagttcaacttgggcgccagttcgtggccggcgagctggcccgattcggaaaccgcagtcatggcgctgaccagatcgctttgcgcttccggcgggaatgcgacgacggcgtaatactccagcggggcatcgtccgccttgagcttgttcttttcgggagccgcgagtgcggaatacaacaggatggcggtgtggtctggaatgctcataggtatctcagttctcaggtctcaggttgataggaagcggcccagttcagaaccgcgatacaacggtattacgtatgtggtgagatgtcaagcagtttcgaagggtctgcggcggcgcatctctgcgcgcaccgctgccagaccttcggcagtcaattgggggcgacgccgcatccggtcaacatgactggcgtctacgaatgctacatcacgcccacgcagcggctgtcctgcgttgttcagaaactgcggcttagtgtgtttttgtagccaccaactgggcttaatttggaatttccgcccgcagacgctggttccggtcattacgagccaaactgtttcgcccggacttatgtccacacacaggaaaggccccgagcgaaactcaccggggttgatgcgtcgaacccgggaatctgcgaagagcacggcagtgtcgagataagccacgattccgggttggatttgatcgagggttaaagccatcagttgttctccgcctttccaaggtactttgcgaacgcgtcgcgcgcaccgctcaggttcttgcccccggccggcgagtggatgaggacgtcgggagcgcgtccaatcgccgcggtgatggcttcggtcgggatagcggtctcgcgcatcttgcctatgctgggcggcaccagcaggtcgtagcgctcgtggatgagcagttgttcgatgaccacctcgggatttacccacatctcggcgcccttgcgccgggtcgtcttgacgactgggtctcccgcttcggcgagcatcttgacgcgctcgcgcaggtcgtcttcgaattgcttgaacgcgctgcgtgcgccccacaggtgcatcacctcttcgggcgacaggtcgaccacggcccgcctgcccgactctacgtccaatgcggccgtgccgtactcggacgcggccgggcaccagcgggccgacgggcagtacttgcagtgttcgccaggtgccgggggcgtaccgcccgggctgctggccgcccgggccaccgcatgcacctcggcgtcgagcttggcgcgctctgtggccagccactcaggggtaagcggcgccagcacctggaacggctcgccgaagcgaatgcgcggctgatagacgaatgcgccagcgtgcgtcgggtcgatcttgtcggtgccgagccagtcggacgtcagcactgcgagtgccccggccacctgctcgttcggctcgtctaacgtaccgcagcctaccggtgacccgccgtacttgtagtcgcccacgaccaggcggcgcgcgacgccgttccagagcatcacgtccgccacggtgcgcaattcgaccccgtggatgtgcgcggtgaaccggaattccggtacggcggacgacgcggtcgcacaatccgaaaacaacgactgcgcgtgcgcgacgtactggtcggcgtgtgcgtcgacttgcgccacccagcgcgtgacgccctccgccgagtaatcgaagccttcgagtccggccggcggctgcaccggcactgtcgagcgttgcgtcgacggggcgaatgcgtccaatacgcgcgcctcggccactttgtgcgcctcggtgccctcctgcgcggcggggccagactgcgtgcggatccgaggcagcacggctgacagcgcgcacttggaccaacggaaacggttggacatggtgaggatgggccgtgacgggtccggcacgaccagtcgtgcgccctcgggtaggtcggacggtgcgggaaagtcgaaggtcatgtggtttcctgggttgtaaggtgcagtcgccaccctacatatccacagggcagatgtcaacccaaagtcaactattcacgcaatagtgaaccaaacgtactagatgccagaggataaagctcttaattctctatatttaatgccaatgaaaaaaaggaaatttaagtcgatataattcttttgatttcacgttttagatatagagaggtttgttggtactttgcgtctgttcctctgcgtcgtgtacttttggttcatgtggtgcggggagacgcgtttcggtccagatgcgatacactccgcacatgtccgaccccacgccccatacagaactcgctccgatcaaggcgtcgttgatcgcggacttggtcggcttgctgaatctcaacttggcccaagtggtcaaggcgtctgcggtcgggtgtccgacatgcaagggcctgggcacggtcggtgacagcgaggtcggtcaggacgtgacgtgcccttcgtgcggtggcgttggtgcgatcgaggcgttcgtgctggacatggacgccatcaaaacacccgaggtgggccgccacatcgagcagtgggagtacaagcagggccagttcgttccgaagtttcggcctaagtcggcggctttcgcccagctgaccaagatcctgggcttcgacaaagcagtgctcgaggtggccggcgccgtggccttcgccgacgcgctgtcagacgagcagcgcgcgcagatcgtggatcaagtgcgtgaactggctcaggccggcgccctgtgaacgcgcaactcgtcccagatcccgtgctggccttgatcctcgcagcgcgcaccaatttcgcggcgttcgtctcggcggtgcatcgaccacgctttgtccacagtcatttttcgttgacggtatgcaaatccctggatgcattcgtggaggacgtaatcgccggcaagcgtcccattctggacctcacggccccacctcaatttggcaaaagttcgcttatttcgcggtgtctgccggggtatttgatcgggcgactaggccccgcgctcgggcaatgtcgcgtggcgctgtcgtcgtatgcgctgtcgcgcgccaaggcaaacctacgcgacgcgcgcagcgtgatggccgagcccatctaccgcgaaatatttccacacgccacgctgataggctacaaggtcggtcaacacaccgccgactacttcgaccacccgttcggattcgtcaaggcgcaaggcgttggcggcagtctcacggggttctctatcgacgtcgggcttaacgatgacttaacgtccgatgcccaggacgcacttagccagaccgtccaagatgggcaccttgactggtacctgacggtcttcggtacccggctccagcagcgtagcggacaggtaaacatgggtacgccgtggtctgccaacgacatcatggcgcggatcaacaagctgcacgagggaaagccgaactatcgccgcctgagcttccccgccatcaacgctcctgacgaggtgggcttcgacccggatttgcccgaaggctcgctggtaccggcgctgcacagtgaagagaagctgcgcgagattaaagcggccatgtctgaggcctggtgggcggccatgtaccagcagcgcccgctttccgaattgggcgccattttcggcaagggcggcgtgcgctactaccgcaaaaccgacctaccgacgcaattcgtccagaccatcatgaccgtggacgccacgttcaaggacgacccgaagcggagcgacttcgtgggtcttggtgtgtggggaaagacggcagacgaccgcgtatggttacttgcacatcgacgtgaaaaattgtcgttcacgcgcacggccgaggcgatcgtcgcgcttaagagcgcctacccgcagtgttcgcgcatattcattgaagccgcagccaacggtcacgcactggtggatgtactttcaaagcacgttgtgggcattgtgggtgtgccagcgcttggtagtaaagaggctcgctggcatgcggttgcgggcatttggcaatccggtcaagttctcctcccacaccccgaagaagtcccgtctattgtgcctgtcgtcgcagaaattgttgcagctcccgacgtgcgtaacgacgacatggtcgactgcatggccatggcgctttatcagctttgcatgcgcaacccgatcagcagcttgatcaatagtgacatcttgcggatggctggggcgcggtagttgccgcgcgcgcgccgcttacttggtcgcactttcgtgtaacatcgcgtcaaccgccccggagcccgctagatgacccgccgctcgactccccagcccgcaccgcaaccgcggcggctcgccatatcgcccgtcgacctggcgcgcgccgcggcgggcgacccggcacgtgcgacgcagacctcgctatctctggcaaccgcagaaccggtcgacaccgagcgctacagcgcgcgcgagcagcaagcggccaaggccgtacacgcgatggactacggcttcagccgcggcaatgcgaccgacgcgctgtcgttcgtctctgcgacgggctggccgggcttccagaccttgtcgctgctggctcagctgccggaataccgcaccatgcacgagacgctcgccgacgaggtcgtgcggacgtggggcaaagtggtcagcacgtccaaggacgccgctgcggcagacaaaatcacgcagatcacacagaagctcgagcagctgaacgtccgatcgcttatccgtaccgcagtaatccacgaccaggcatacggcggcgcacacgtgttcccgcatctgcgctccggtagcgtggacgttcctgccgactctccgctactgctcacccctgcgttcgtgacaaaggggtgcttgcaggcgttctcgtgcgtggagccgatgtggctcactcccaacgcctacaacgcgaccgacccgacgaagccgaatttttacaagccgtccagctggtacatgctgtcgacgatcgtgcacaccacccggctattcaccatgatcagccgaccggtcggcgacatgctcaaggccgcgtattcgttccgcggcgtgtcggtctcacagctggcgatgccctacgtcgacaactggttgcgcactcgccagtcggtcagcgatacggtcaagcagttcagcatcacgtacctgaaaatggacatggcgcagctgttggctccgggcggcgcccagtcgttgcaggaccgcttgaccctgttcaacctcaaccgcgacaaccgcaacgtcggtgcggtcgacatgacgaccgaggacttcgcgcagatcaacaccccgctatcgggtctggatgcgctgcaggcgcagtcgcaagagcagatggccgccgtatcgcacataccgctcgtcaagctgaccggcatcacgccggcgggcctgaacgccaatagcgacggcgagataagggtgtggtacgacttcgtcgcgggctaccaggtgcacaacacaggcccgctcatggagtggattctggatatcgtgcagctctccgagttcggcgagatcgatcccggcttgtcatgggactggaacccgttgtacgagctgaccgacttggagctggccgacgttcgcgagaagaatgcacgcaccgatcagacctacctcgaggcgcagatcgtcagtggcgacatggtcgctcagcgcttggcacaagacccgaattccgggtacgccggcatactggccgaccgcgacgcgctggacgaagtgcacgacttggctgaatcaatcctcgctgaagcgacgaccccacaaccgcaggccccaatcgatgagcccgatgctgaccaacccgacgcgcaagcagaagcaactggcggtgatcgggccgtcgagcgcagctgaacagcagtaccgcaaggcgttgcagcgcgccgtcaaggcgatggccaaaagcgtcgagtattgggcgcttgccaaataccgcgcagcgttggttgccaatcaggacgccgagaacatcccggatcccgaggccgcccaggacgccacgtccaaaacgccattcgacgtgcagcgcgcgctgttcaaagaactggaagccctgcgcactcgctgggagacgtacttcaaggatgtcgccaagcacttggcggtcgacgtggtcaacgcggcgtaccaagcaaacaagacggcgtggcaaggtcgcgtccgcaaagagggattcgacatcccgctgcaactgtcggccgcacagcgcaccattctggatgtcaaggtcaacgacaacgtcgcgctgatccggtcgatcccggagcaatacttcaccaagatacaaggcgacgtgtctcgggggttcctcgccggtcgggatctggaagcgatcgctagtgagctgcgcgacaccggaaaaaccacggtcaagcgcgcggccctcatcgcgcgcgaccagtcgaacaagctcaccgcgcaaatgaacagcgcgcgccagcgcgagctgggcgtgcgttacgcgtactggaagcacagcacggtcgacaaggatccacgccccgggcatatccgcgccagcaaagagctctggatattcgacacgcaggtaggcatcgatttcggggatcagttcggcttcgtgctgccatcgatggcgatcaactgccggtgcgggtcgcgcagcatcatcccggcgatcgacgaagacctcggcccggacgacttgctagccgttccgggcttccctggggcgtttactcggaagccgaagacgcgttagcgccggctcgcgcgagaagcaatagcacttcgacacaacctttgcgccagcgccgtacgccggcatccgcgcacacgtgcagcgtttcttcgtcgtcgtgcgttgcataccacttgtaagcaagttcgcttgggctcacgactgcacctcaccccgggctttggctagcacctcgagcgccattacggcgtcagacggctcgagcggcctacgcagcgtggcaaggaattcgagtgcgtcgtacaactcgggcgccgtgaccattacctgcgcattggcgcggcactgagcctccaagatgccttccccgcccagatgttccatggattggccgtccgcaatcgtgtgcccgtcaggagcaacgatgtagaacacggtgtgcacgccgtcggtgcagccatccctgaacttcacagtccacgggccgggagtccactgtggcgcaccgccggctttcgcttctgcttggtcgttcatgttgttagttcctgcggttgtggtgggagtcactttagcgtgaccttttgtgcttgtcaacaacaacgcttgcacgtttatgccacacagctatcatcgcgcgcatgcctgttgcaaccgctagttacgcgttcgataagaagtcggcccggtcgttcgatgccgacgggcgtatgcgcgtgcgcgactgtgtgctgtccgacgcggatatcaacccgtactacggccgtgagatccccgggtggaaagaactcggactcaagccggacaccgtgtacgagatgtatcgtgatccggacgcgctcgcgctcgccgccgactcgttcaacggcttgccgttgatgatccggcatatcgcccagacggccgacgagccgcgcaaagagcacaccgccggcagcgtctacaacgtccggttcgagccgccgcacttgcgcggcgatctgatgatcgcggacggcaaggcgatcgagttcgtccagtccggcatgctggccgatctgtcgtgttcctatcgctacaaacccgaaatgacacccggcgaagtcaacggccgtcgttacgacgggcgaatgatggcaatcgacggcaatcatgtggcgctcgtcgaagacgggcgcgcaaccggtgcgcacgtcgctgatagcgcgctctcttcccaaactggagcaccaaacgtggatccgatcgaaaacactcccgcaccggcggccggcaatgccgagttggcgcaagccctcgtgctgctgaccgaacagctcgaagcgctgaaagccgacgtcgctgcaatgaagggcgccccgtccgacgcggataaacccgtcgaaggcgtgccggccagcgtcaacaccgcgcacgacgaagacccggacaacgacaaagataaggatgacaagccagtcgcgatggacgccgcttccgtgcaggccgttgtcgacgctgccgtcacgtcggagcgcacgcgcgccaaggcggtcgagcaggccaagcgcgattgccgtccggacctgggcgacatgatcgccatggacaacgccaacgacatctatcgcgaggcactcaagcagcgcggcgtagacgtgtcggcgattcccgcaggcgccgaaatggcgacctaccaggcgatccagtcggtcacgcgtggctcgcgcctggatgtcaccgtgtcgcgtgccaacgacagcgcttctggcgcgcccgccttcgacacttcgcgtattcgcaatctcggtcgttaagaccaatcctcgggagttactgaaatgccctttcaatctactgttgctgtcaacccggcgattggcgtacctggcgactttgcctcggtcaatccccggcagttcgtggtgtccggtacgctgaatcagcgcatggtcagcgccccggcctcgccgggccccgcgttggccggcaagttcggtttgctgtcggcgaccggcaccgtgtcgagcacccccggctatgcggccgcatcggcgactggcgccgcaacgcgcatcggcttcgtgcatcgctacatgggcgcggcgctgatcaccacctggctcggtgaaacttccatgaccatccagcctggccaagcggtcgagctgttcgcgatcggcgatttcttcgccacggcagacgcgatcaccggtactccggtgcgtggcgctgcggtcatctgggatccggctgccggcaccatcaacatcggcgccgcagtgtcgagttccacgatcgacaccggcttcaagttgctgagcgagacggccgtcgcaggtcagaccgtcatgatcggcaagaacggcgcgtaagcggccaccatcgacaacctcatacaggaacagtgaccgtgaacgaacgtcaaaccatcaatgacttggcccgcgtcggcatcgtattgcccgatacggtcaaacaggtctccaaggaagcatccgcgtacgccaacgacgcgatcagtctggcccctacgctggtcaccggcgcgagcgccggtatcccggcgtggatgtcgatgtacgtcgaccgccgcgtgatcgacattcagctcgccccgatggccgcagagaagatcctgccggtcgtcaagaaaggcgactggaccacgcagtacgccgtgttcatcaccgccgagccggtcggtcaggtcgcgacctacagcgactggtccgccaacggcatgtcgaacgcgaacgtgaacttcccgtcgcgccagaactatatctaccagacctggaccgagtggggcgatcgtcagctcgccatcatgggcgaggcgggcatcgactgggcagcacgtcaagagatcgcctcctcgaccgtgatggccaagttccagaacagctcgttcctgctgggcgtggcgggcatcccgaactacggcctgatgaacgacccgacgctgaccgcgccggtcgctgcgaccgtcaactgggcgaccgccgagccggaagccatcgcgaacgacgtggtcgcgatggtgggccgtctgatcgcgcagtcggcgggtctgatcaccggtcaggaacgtctcgtcatggcgctcgcgccgtcggccctgaacgacatcaaccgcacgaacagcttcggcctgtcggccggtgccaagatcaagcagacctacccgctgatcgagtacgtggccgtgccggaatacgacagtgccggcggtcgtctggttcagctgtgggcaccggaagtcaacggccagccgtctggcgaagtggcgtacagcgagaagtaccgctcgcatgccatcgagcgctactcgacctaccagcgccagaagcacagcgccggcacctacggctcggtgatctacttgccgttcgccgtcacacaattgttgggcgcgtagcccagtaacaccgcaggaacaaaccccgcctaggcggggtttgttttgcgccacgtccagagtgtcttgccgctatcccacacccgcaaggcccctaccgcgtcctcgatgtcccactcggtgcgcgagtcgttagcggggtcgaacgctgcagaactgccgatctgcaacagccgcgttggtatgtgcttgcgtgcccaggccgacttcggacgaaacccaagcttccggtgatacacccggtaatccggctcgacttcctttgtcgcggtgaacccgagcgcctcatacacgccgcctgcgaaccagtcgtgagcgctgtagctgacgacgctctgtgcgcaaagaacggcgacggcatgcttaaacagcttagacgcacctccacgtacttgtgcactcgtcgcgaaccgcgtcaagtcccacacgcccgacttggtgcggttgcgcgaataggcatccaagttaaacgtcatcaccgccaccaggccgtgcaccgggtgctgcagcccgaatcggcgcgtgtagacccgccccggctgctgcggatggtaggcgtctaggaacgcgattgtttcggcagtcgtaggctccacaatggcgcactggcgcgcgtgcagcttggcatcttgcgagcagcccaacgcgttccggatcaatcgttcaaactgcggacggcgttccttccattcggcgcaggtaacagccagcaaccgatagcccgcggccgcgacagccgtccgtttatcgcgccccgccgtttttgagctgcgccggtcggagtgccagtacaccccgttcagttcaatagcgatgcgcgccgagggcacaacgatgtcgagttccttcggcgcaatcagtttccggtcagaaccgtaggcgtctgatttaagtgattgcacgaatgccagcaaatcacgttcggatggtgacgggccaaacttaccgcagcgcgggcagccgtggccgatcaagtgattgtttgcaatttgctgaaacggcccgtgctcgcgacagtgaattgtcactcgctcggtcgaacgcgagtagtcatcgatcgaatagtcgtagcggtcgccatgcactgcgcgcgccctcgcggcaaagtcggcctgcgtgaagaaccccggtgccgaagtttcacgtccgcacgccgggcagcccgaacccgcaacatgtgcgcccgctttctgcgtgaagcccccgtgcttggggcaaatgatcgacaccgtgcccagtgcgtgcgtgtacagcgtctgcgcatagtcgtagcgagcgccgtgcactgcgcgtgctctggcgatgaagtcctccgccgcggccgtgcgccgtgcgaggccacgctcggcagccgcgcacgccgggcagccctgaccgccgtttgcgtggtgtgccggcgtttgccggaacgggccgtgcgtgcgacaaactatcgatacaggatcgtcggcccgaacgtactcgacggccgaatagtcgtagcggtcgccgtggaccactcgagctttttcgatgaacgcgccgaggccttttcgctgcgtcaaactgcgagcccgaaggccgcagtcggggcagccttgcccagcgcgatgtttgtccggcgtctgcatgaatgcgccatgttcgcggcacacaatgcgcaccggcgttcgcgcatcgatgacctctgcggggtagtcgtagcgggtgccgtgagtgtgccggaaacgcaccaaccatccgtcgtgtgggatcttgcgagacatacttactccagatacgtgaggtgaactttaatcgcacccgacacgcaatgcaagcgccgtattcgtgtatcatcgcacgcgtaaaccacacctacaggaacaattgcaatggctcgcaaccgcaacgacagcaaccaaccgtccgacagcgccggcaccgtcaccatcgcgtgccgcctgcctgcgggcatgcgcttcgagaatgttcccggcatgccgggcggtgtgctgatgatccgcggcagcaacgacgactgggcgctcaagatgatcgaagagtacgaagcgcacggcctgaccagtggcgtaccggccgaagcgtgggactacatcgccaaccacccgtactacagcaaggccaagtggtacaccagtggcgccgtgtttgcgaccaccaaggccaaggatgcgatcaaggaaacccaagagcgcggccagaccaagaccggcttcgaagcgctggaccccgaagaactgccgggcaagatcgaagacgccgtcaaggccgaagccaagcgtaattgaccggagtagcgcatcatggccgtcgttgtctttgaccccgcagcattcaaagccgcgttcccagagttcgcgacggtccctgatgcgcgcttgaatatcctgttcctctctgcgaccggcgtcatcgacaacaccgatgcatcggtcatcgcggatgtggcgcgtcgctccgcgattttgtcgctggtcgtggcgcacctgctcgcgcagttcggtacgactgtcgtcggcaccggcggggcgaacccgtccggggtcgtcggtcggttgtccagcgcgaccgagggctcggtgtcctcgtccttcgagttcaacattccggcgtctgctggcgcggcgtggtggaaccagacccagtacggcgcaatggcttggatgttgctcgccccgtttcggtcgttccgttacgtggcgatcggccattccggcgagggctatgcccacgcgttcgccgatcggcgcctgtaccccgagggcgcgcagttgctgtccgaaaacagcgggacgcccaacggcgtatgaccaccgtccggcgctcgggtgtcaaactcccttcgcacatgcgcgagcagttcgtgcccgcgagcgtcaaggcaggcgtgctcgagggcgcgacatacccacaggatacatacaccgatcaccgtaccggccagcaagtcgccgatgcccgcggcgggatgcccgttgcggcaatcgctcaggcgctcgaatacggtcatgggcagaaccatccgcgcccgttcgtgcagtcgacattcgccgcgcagaatctcgcctggtcgcgtggtttgacccagttgatcaaggcgggcgcggcgaccgacacggccctgcgcacgattggactacgcatggccgaagacctacagcagacgatccgcgactggcctgcggacaactccgaggattgggcggcggtcaagggcttctcacatggcttgatttttacgggacatctgaccaattctattgactcggctgttgtgctgcgcgacggcgactacggcgaggatccaagcccgtgagcggcctgaacctacacgcgatcgtgcgtggcgctatccagacggtcaatcccgatgtaccgggtgacgtctacatatcgactggcgccacgacggccggcggcatccgtacaccgacgttcggcatgctgccggcccaacgcctgcaagtgcaggcgatgtcgcatgaggatctgtaccacctcggcgggttggccttcgcaggcaacatgcagaagctctacgcgtacgggcagtttgccggcatcgtgcgtcccgacggtaagggcggcgacgtggtgcgactcggcaccgaatggtgggttgtccagcacgtgctcgagtggtggcccggctggtgcagcgtatcgatcacccggcaggtcaacgccgcgacgttggacgcgctgacgaaggcgttagccaacggcgcggtgccgaccttgggggtgtcctgatggccgccgcgctacttaccccgaacgaagaccagaccttcgcggcgctgttcgacttcatttccaaggtgctgggcctcccctacgacaccgaccagatcgtcaaggggtttcagaaccttgtcgcgacgccgaccggtagctatgtggtcgtgtccccggggatcatgcagcgtcaggattttggacgccgcggctacgatccggacggcaacgcgacgatcgtcggtgcgcaccagacttacagctatcaggtggactgttacggccccgaaggtccgacctgggcgtcagtgctgcacgctgcgtggcgcacgatgtgggccgtggacaacatgccgtctggggtgctgatgcccctgcactcggacgcaccacagcagcttaacgttgtcaacagcgaaggccagttcgaacagcgtttcatgatccggctgttcggccaggtcaaccagcaagtcacgctgccgcaagactttttcgacgtggcgactttggattccatcattgtcgccgatcaactatgattggcatatccgaccggagagcgtgacccgtggcaaatatccctatttcgcaaatcgtaaccgtcaacccggcggtcgtcagcgcgggcgggccgcagacctcgctcgacggtctgttcctgacgcagtctacggccgtggcgccgggccagctgcagccattctacagcgccgccgccgtgactggcttcttcggtgcaggctccgacgagtccactgccgcgcaggtctacttcgccggcgttctcaatggcggccagttgccggcgactctgacgttcgcgcgctacgctcaggccgcgacctcggcccaggttatcggcgcaccgaccggcctgaccctggcgcagctgcaggcgctatccggtacgctgattgtcacgaccgacacccaacgcacctcgagcgcaatcaaccttgcggccgccacgtcgtttgccgatgctgccgcgcgcatgacggccggtttcaccacgccgaacttcgcgatcacttacgacaacgcgcgcgaccggttcgttttgtcgaccaccgcgaccggtactgcagcgaccacgtcggcgatcaccggcacgcttgcctccgccgtcggactatccgctgcggcgggtgcatttctgcaagccaccggtctgcccgccgatacggccggcaccgcgatggaccgcgcgaccgtgctatcgaccaactgggcgatcttctcgaccatttgggcagcgacgctagccgagcgcaccgcactggcggcgtggaacagcgccaacgggcagaaccagttcatctacgtgggctgggacaccgaagcggcgagcatcgtccccaacaacgcgtccagcttcggcggcgtggtgttcaacactccgtatacgggcaccgtgccgctgtacggcggcctggtgcacgcagcaggtgtgatggcgtgggcgggcgcgacgacctacgacgtggtcgacggacgcaacgcgctagcgttccgtcagctcggcgcaggcgcgacgccgtcggtcaccaacttggccaccgcgaacgcgctgctgaccaacggctatacctactacggtagctacgccaacagcgccaacaactacagcatctactacaacggcgccctgtccggcgcgttcgactggtccgacacctatctcggccagatctggctgcgccgtacgctgcagcaggcgctgttcgaaaccctgttggcgtacaactcgctgccctacaacgcggatggttacaacgcgatctaccagggcgcacaggccacgatcctgcaggcgaccgccgccggcatcatccgcgaaggcgtgacactgtcgccgtcccagcgcgcgcaggtcaaccagcaggcgcgcctgcagatcgacgaccagttgtcgacggtcggctggtacctgcaggtcagcgacccgctgaacgccagtgtgcgcaccgaacgtggctctccggtcgtcaaattctggtactgcgatggtggcagcatccagaaaatcgacatctcttccaccaccgttctctaagaggcgtcgtcatggctgctaccctcaccgttgcaaattcctcgatcgcgatcaccgtcgagtcgttgtacccctcgtcggtgctgctgtcgggctacgccgcggacaacgtgttcgagacctcggcggtcgtgaacaaagagacctcgatgggcatcgacggcaagttctcggccggcttcgtctacaacgagatcccgttcactctcaccctgcaagccgacagtccgtcgctcatcatcttcgagcagatctggcagtacgagcagaccaaccgcaccggcctcgatgtcggcatgaccgtgacgctgccgtccaacggcaagcgctacggcttgcagaatggctacatgacgtccttccgggcgccgagtggccagcgcatcctgcagccggccgcgatcgagttccgcttcggtcggatgacgtttgcgcgcacctgattctcggtgcggtaaggcaagaaacaacaaagcccgctttcgcgggctttgttgcgactgggctctcccggtcagtcacgtgctggctgcgccttgcggcgctgcgacaacacgtttattcgacgtgtcatcaaatccgggccagcccggcgaggtgcttgtagcgctatcctgtagcgctatcccgatgagcaatgcgcggacgcatcttacaccacagcgcacgtgctggggaactgcgaggacgttacttgccgaacagttccaggcaggcgcgcagcaactggcgctgttccggctgcagcttctgcatcggcacgccagcgatgccgactgcggccttgatcgcgtcgatcgtcgcgacgctatgggccgagatgaaatcgcgtgcgatactcaacagcggcagcaacgcggcgtcggtcgccggtgcagcgtcagtcgccgcggcgatcagcagcccgagcgcttcgtcgtccagaccgggcacagccggcgatgcggcatcgggttcgtcgaccggcagcgtgtgcgtctcggtcgtttccggaacttcgggttctgcaccaggctcgttagcctttgcgttgtcggcttcgatctgcgccttggtacggcgcgggcgcttgggtttctcctcgaccggcgcctccggcgggtcgatatcggacggcaggccatcgccgtcgccaggctccaggatgcggtcttcgtcgggcacgtcgacacgctcgatcttcaagtcattgatgacgactcgcggaccgacctgcaaaaacgcggggttgagaatagcgacgaactccgcgagctcatcgatcgacttgaagttcagctccatgggttactccgtggttgtgggtttgcggcgcggtcgacgcagtgatcgggtggtgtattcggtgaccagctggccgcggtacttcgcctcgtcgcgccgtacctcgtcctgcagcacctgcatgcgctcgcggctggtgacacgccggtagcgcatggtgcgcacctgctcctcggaaatgccgagcaggcgcgcggtgttagcgtgcatgccgatcgcatcggtcagctcgcgcagggtccaagcttcgatcggcttggtgaaatagtcggacgggtcacacgttgtttcgggggcagccatttggtcagtctcgttgcggtttgcgataagttacgcgctggtgcgctaatagtcaacccgccgtagtgttgcggtggtagccgccgtccggcaagtgtcgatggcggaacgtctcgaagttgattagtttgtttgccgcgacatatgcagcacctgcacatcgtcgcgagtcaccctcgcgaagcgattcgtaccagatgtcaaacttacggccacttcgagcgtcgagggccgccccaagttgccaagcgatgtataacgcgcttacatcgtgatgacgccaggcccacggggctagatcgaccggcacgtaccgatcgttcgcgatgtcgagcaacaagtcggcggggtacacgtacaccaggccgtagcgcaccacgaacaccggagtgtcgggatgcaacgaagcgagcggtgcatcgaggggtttgcagagcatcacggctcctccgggtaagtgcagatcatctggttggcttccatcgcgcaccgcgtctggcgctccagcacgtggcgctgcaacggcaaatcaaagtccatgacgtactcgcggaacagcgagtcgtcggcgttgtagacctctacgcgtaccattagcatgtggatgtctccgtggttgtggtgaatcaaacgtaacgcacaagttacggcttgtcaatcctttcgccaccgatccgaaacgaatcccgcagcgtccagcggcaggcccggcgcccaccgcggcgcgacgcgcagccgcgcgagcaactggcccaagcgcacctcggcccggtcgcgcggcacttcgaggatcacttcgtcgtagacgtggtggacgatcttctcagccggcgcgatgtcgagcatcgcctgccagaacagatcgcgcgctaggccctggaccatgttgttcgacaggatcttgcggtctagcgtctcgacgaagccttcgggcttgtcgtagacggcgagcggtgcagaagcgcccggttccagcacgagacgcgcattgtggtagctgatcgcgcgacccgagggcaggatcatgcgcaacgccgcggagtccttgacgaacgtcacctccgagcacatgccgcgcccgatcggcatgcggacctgtcggccgggttgatctagtgcgatcagcaccgcgtactcgagggcggcccaccagatggccatcttggagtggttctcgcggtacttccagacgagtttcttacgcaggtcgtcttccaggtacttgccgtagttgcgcgccatgttgtcgagcgcaccgtcgccgccaccgtactgcagcgacaggcgaacgaccttgccgatctggcgctgatccttatccacgttttcgacaggcacttcgaacacgccgctcgcttcgaccacgtagccgtcgatgccctcctcgaactcgactagcatctcctcgtcatctgcgcaccacggtcccaagcgcgcctcgatgcccgcaaggtcggcgcacaccaacgtgtgctcggggtaggtcgcgcagaacagcgggcgctgcgcgtccgccatagcggctagcggcggcccgacctccggctgcgacaggaaatcgaagtcgtcacgcgttgcggcggcgagatacgcttcgcacgcttcggctttgcggcccgggcggggccgcgccacgttgagaagctgagcgtcaccgcagcccatcgccgtagatcggccggacagtgcgccgtggtagaccgtgctgtgcatcatgcggccatcgacgtgcgcgcgcaggatcgcgcccgacttcttcggtgcccggctcgcgtccagacgcagcgcgagcacgtcgcgcagcgccggcggcagcgtgtcgcggctcaacagccccttgaccgtctcgcgcccggcgtcgtccatgtcctcgcccagcgtcgacgcgaacgcgcggatcttttgcacctcgctggccgatagcagcttaccgtcagtggcggcggtcaactcgtagtcgatcagcgcctcggccaactcgcgcatacgctccataccctcggcgccggccacgtcgcagccgaagccgcggtcgttgacctcgtagtcgagttgccagaattgctgctcgaggtcgggcattggcaccgtcgcctcccacagcgcgaccatcgcgttcgtgtcggtcaacgcgtacttgtaggtatgccgaaagtgctccggatgcgtgacgggcgtccactccgggtgcaccatcaactctttcatccacttggccccctcggtgtctttctgcaccgctaggccgagggctgcgcacgcacgctccagcgagcccggcaagccgttgtatcgggcgcgcgccgcactgcactgcacctggcgcacgtccagcatcggcacttcctggccagacgcacggagagctcgtgcgtgcggcccgttccacatgcccagatcgaacccggcgttatgcgcgacgaagcgcttacgcgcttcgatgtgctggttgacttggcgtggcacgggcttaccgtactcccacaggtcggcggtgcgcatgccgggcagaacgaacgtgaagcagtacgcacgggtcgacggatcgcgtaggtagcgtgccaagccgtggcgcttcaagtcgcacagcgatgcagcctcgaagtcgaggaacagagtgtcggtgttaggggtcatgtgggcttctcgttgtgtgggtagcgcagatgttacatcactgcgcggatgaattgcgccgcgacttcgggaacgattgcattgccgtaaccacgcagcgctgccacgcgggtgggtaccccatgagccagcgggaatgatccgggttcaactggcctgcgctttccatccctgcatccgagccaatcagcacctgtccagaagccgtgtagcggatcggttgcgctagccaagccactcttcccaacagcgcattcgtgggtacgttgtcgcatcgggacccgtccttccaatctcgtgctgttgcggctggccagcccgccagacacgcagccgctgccaagtccggcccgtgattgcgcatcgcttcctgcaacccgccctcgaatgtccgcacgcccttgtcggccagcgccgccgttggcgtgggccacccagtagagtcgctggcggatgtgcggcgcgccgacgcccgcagcgcacagatcggccgccccaacggcgtaggccgcaccttccaggtcagcgcatacaaggtcgagccagttgaggccgtcgaggcttgcaacctgctcgccaaaaacgcttggagggcggcactgttcaatgagccagtggaatgcgggccagaggtgccgctcgtcagcaaacccagctcctttgcctgccgcgctgaaaggctggcaagggcagctgccagtccagactcttcggtctgcgggccacccggcgagctggagggcgagtggccatccgccgatgccggcgaagaagtggcattgtgtgtatccgcgtaggtcatttggggttacgtcctcgatactgcgggtgtcaatctcgcacggtgggatcaatccttcgtctcgcaactcggctaaccacgctgcggctttcaggtcgtattcgttgaggtagttcatgtgggccctaaatcctatttgtaagccggatcatattggaaagtcgccatttgtccgtcacgcacaaatcgtacgtgagtgagccaaacaagtccatcctcgaacttggtgaacgtgatctccgtcggttgcgggatcaggtcgcgctgcagcaacacgcggtgcggctccttcggcagatcacggcccgtcgatacctcgaagtatttccgggcctgggcgaagaagcggttatcggcggtgcgccggtcgaagtccagacgcagctggtaggtgccaaccgccgtctcgtagtggaatgtgaggatgctttcgccctcaggcaccgagtaggaatggtccaccggaacactgcgggtctccacgcacagctcgtcgcgcaggatgatcgaatcctcgtcgtgcaggtcgtagctgtctccgatgccggagtgcgggtcttgcggttcgggcttgcgcgactgggtgacgaacccctggcgcggacggttgcagtttcggcacgtcatgtgctcggggtcgtttaggtagccgcacccaggctcgtcggagtccatcagccccagcacgacgcgcaagtcgcgttcctcgatgtcggggctgggtgtcgggaaacggatgccgctgcgctcgcgctggaccgcaatccctggtgcatccacgcgctcggcgctgcactcccacaagccggcccgtgagtcaccctgttcgagatccgcattgatcgggccgagccggtcgaagttgccgccggcgtccagcaccaagcagttctctttgccggcatacgggcgaaagccgcgcccgacgatctgacggaacaacacctgcgagcgggtggcgcggacgatcacgatcgcgtcgacgaacggggcattaaacccggtcgtcagcgtgcccaccgacacgatgtgccgcgtttccttggccaggtattcgcggataccctcgacacgttcgcccttgtcgagatcgccgtaaatcagcgtcaccgtctcgccggcagccaggagcgcggcgcgcatcatgcgcgcatgttcgacgttgacgccgaaccacatcacgtggtcgcggccgaccaagttttccagaccgacggcaatcacctcggcggtgactttcatcgcagcagcagccagctgcttctcgtcgaaatcctcgcccgaggtcttgacccccgcgacgtcgatctgcgggaagcgcaccgtcggtgcgacgatcggtgcgatgtagccctcgcgcaccaagcgattgaacagccgcccggtcgtcaggtcgtataccttggcattgaacaatccgcactgcgacagcggcaccgtcttcacgcctttctgacggaacggcgttgcggtcagcgcaatgaaccgaacgtgcgggttttgctcgcgcgcaccttcgaccagtttgcgaatcgacggcaacgacaggtcgaagccgtgcgcctcgtcgacaatgatgtagtcgatcggcccgaaccggcggatctgacgccacaccgactgttgcgtgccgaacgtgatcttgcgctgacgatccttacggttgagcgcggcgcagtatacgccgatgcccgacacgagggttgcagacaggtatgacgacgcttcgtcgcggttctgcccgaccagctcttgcgacggggccaggatcatcacacgcgcgctgggctgggtggctatcagtttttcagccagcatcgcggcgaccagcgacttgccgccgccggtgacgatcgccgcgatggggtgcacgttacgcgcagcttgcagagcggcgacaacagcattcgccgcctcgtcctggtaccaacggggcgtctttcttgtctgtgagggcatgggcgtggggtctaaggttaaacgaacatgacccggatgttaccgggtcatatggagtcagtcaataacacggggtggccggcgtcgcgtaggcgcgaatgcgacgcacccaatacgcatgaccttgcggtgtcggtcgccacacaaacgcgtggcgcaagctgtcgcacgccaaccctcttggcgatatccatcacagggccgccttgcagtcgcggatcagctgttcgagccaagctgcgcgagccgccatcgacgcattcgcccgaaagccctttcggcgctgccactggcccaaaaacatagcagggccacccagcgcgcggccgattagattgcaacaatcgttccgtgcatgggaaaaacgcgccccgtagcgcacttcactcgccgcaccaagggcgctacaaataccggccccgcggcgaatagcggcgggtaggtatacttttgcgtcctcgaaaagttggatcatcgcccggatgcgggctttctgctcgtcggtatactgaatgtccatggtggtatgtcctgtgggctgtggtgattaacgcttgactttcttcatgtagccggtgcgcgggcaggcttgccgctcggcatagatcggcttgatcacccgggcaggcttgccgctcggcatagatcggcttgatcacccgggcaagcgcgccgggattgaacgcgcgccaagggtgactagacttcggcttggtggcggtcatttgactgccccgagtcgatcgatacagtccgccgtagcggcacgcttgttgtcgcgatcgacgatcgcgtaagccgcctgggtgtaggcgccgacccagtcggataggtcagtcgacacgggcggcggatccagcgcaatcgcggcggtccgctgttcgcacagcacacgcgcttgcgcggcttgcttcccaggcacggagcgcgacgtcgcgcatccgctggaaacgctcagcgtcagtagtagcaggatcagtcttaacatgggcgatttcctgttgggcattggtcagttgggtccgggtgtcggtggtctcggcgtcgacgcgcatgcgaatgtcgtagccgatggtgatcgcctcggcctggtaggccaccgcttctttggtgacctgcaggtcggcttcggtggtcgcgtcccgtgcccccttggcgtacagccagtacaggccgcccaggaccgcggctacgaggacggtgtaggtgatggcgcggattgggatagggctcatagcttcgggtccaaataacgaaaggcgagcaaacctgcgtcgacgatgccccttggcggcaaagtcttggcgaaatccagtatccgccgcagggcttcgagggtctggaatggcaaaactatcgctgcccggtcgtcgtggatatggtcgctcatggtcgatccagtattttcgccaacatgcggtctgtacacccacgacactcgaactcgccatcggtgcgaagtctaaacccggctctgcgcgcatcttctgtcatgccacgcaccgggatgcgccctgcgcgcacgaattcaccgggcccggcccgggcgcactcgtgacacaccggctctacccagaacttagcggcgctcatcgcgcacccgccattccgtaagcgccgcacagtcggcccatcgtgtagtccgcattcgtccccgcgctagcgggcaaccagtcggcctcgacgtccaccgcttcgccgaaccgttctacctgcaccagcaggaagcgccaattctggcaatcgaacacgtaccggccgggcgcccactcacccaacgcattctggtgccgggtccaggcgaggatctgactgtcggcctggcgaatcgtcgaggcttgcacctgcacgccttggccgatcgcatgccaacccaacgggctgacggtctgtgcgtttgcgcccgaaccgagcaacagcgcggccagtgccgcgtaccaacgggacttgagtttcatcaggacaccatgtcgaggatgcgggcgacggtgcgcagagcgatcgtcacgaggattgtaatcgttaggccggtcgccagcatcgcaccgaccagtcggcccgggtgcgggtggcgccgacgggcctgcgggccgcgtggtgcgcggacgccgtacggattggggatcgaggtgttcatggcttatccttgatttcgattagggtgtctagccaattaggtgcacacagtgaagccctaaacggcgaccacgctttgcctcgcacgctcagccagatactggaaccagacacaggtcgcgactcgaatagataccagcgaccatctgcgtcttgtgcagcccactgcgcccaatccggcacatcgacgggcttaccatcgagaaccagaatcccgggcgccacctccacacacgctacgcactcccccgccaacgcagcatatgctgctaggtcgacgtagtcgtcgagcttgccggccgacgtggcgaacgcccgggcttgtttcagtacggtcatgaacagccagccgtcgcgctcggttagggcatacccagacagcgcgttgaacgcggcgacggtgcgcgccatcgagcgttcgccgcccggctggtcgcgctctgcggcgcggtcgtcgatggtctgcgcggactggcgcaggatgtcggaagcggtaggcatggctcaagcctccagcttcgacaggctggaaaacaacgcagctcgttcttcgatccacgccgccgcctccgccgccgcccgcgccgactgcgccgccgccgactgtgccgaccgcgcagccgaccacgcctccgccgtcaccgattccgccgccgattccgccgccgactccgtcgtcgactccgccgccgactgtgccgactccgccgccgaccaggccgaccgtgccgccgaccaggccgaccacgcagccgaccaggccgactccgccgccgagcgcgccgagcgcgccgccgagcgcgccgactgcgccgccgactccgtcgccgaccacgctgccgactccgccgccgactgcgccgactgcgccatcgccgactgcgccgaccgcgccaccgaccaggccgaccgtgccgccgactccgccgccgaccacgccgactgtgctgccgactgtgctgccgactgcgccgactccgccgccgactcgacgccatccacacctgcagcgccttcgtggaatcggcggccaacctcgagggcggagacgacctgtgcaattgcgtgagtaacttggtcgggatgatcggccaacaaggcggcgcgctgcgtcaccagcatcctgtcgattcgcgcaatggcgatgagatgcggcagcggggccaggtccacgccgaccgggatgcgctttgcaagctcgacgtggaagctgccacgctcagctgccggcaagccctcgaacatcgagtcctgcaggcggatcaaccattccggcagggcgcgcgcatccgccacggttgcgtgaaagctagtgctatccgggtcgatctcgtgagcgaagcagccgaccgagcagccgcggaattggccgtcgtgcatctcgccaaacgtgccagagaccagcatgtcctgtgcttcgtgccgctcagcctgagcaacgtgtagtgccttgagtgccggatcgttattgaaagaaagctgtgccatgtggctgtctcgtcgtgggtgtgggcttagtatgtcacttacggtttacttctgcaagcgcgttttcgatgtcgcgcatcacagtatcgatcggcaccgtacggtcgtagatgccgatcggcgtcccgcccgggtgcccgtacagggcgtgcgcggtagcgccacgttgtgagacgcaaatcacgtaccggccgtacttggagcgcatatgggagattctggcgcgcattaggaccgccagtgccggtcggcgtttcgcgactgcaccccgaccatcgcggcacgcgtcgcggggtgacgactgaaagcctcgatcagcacatcgcgggtgtacgacttctcggatgaccaggctttgccgacgaccggcaccacgccagtcggacgcttccagatcctgacgaccaggctgcagtccttgcctagcctggacagcgtgccacggtcgagcgtgacgccggggagccactgggccgcctgttcgacggtccacatcggttcttgcgtgaatgcattcattgtgggcaaatcctctgtgggttacagggtgaacgcgcagccgaccagtgccagcagcgacagggcgacgctagcggttgcgccgcaggtcatcgcagtgatcgtgcggtcggcattcggcgccacgaaggacagcacgaagccgaggacgataaggaccagggcgatagcgccgaaagctacggggatcaagatcggatcgaacatgtgggtgtctcgacggtgtgggactagaatcccacatgctatcccccatgtcaaccaaaagttacatcgattttaactatcgaatagcgccaaacgggttgatcggtatgacgttgtcttcggcaggctcccaaccctccggggcgcggtagacgcgcaagccacgtgcgtcctgggtcgcaacccacccgcgcgtcttgagccacgcggcggcctggcgcgcgctgaacttacggcccgagggcgttgcgtccagcgcggtgcgaatctccagcgagccgacacggcccgtctttgcgccgaatttactcaggatcggcggtagcaggtcgtcgagatccgaatcgaccgtaccgcggcccgagcgcatgtcctcggcgttgtacgctttgaccagctcgggcaccgaccgtaccagcttggtgtactcggcccaggaatcgcaaaaacgggctttggcttcggccaggatctgcggcaactcgacggcccaatccagcgggggtgctgtctcgcagagcacgggcatgaagcggctgttgccggtctcgtcgcgattgagctcgtgtttgtttgcggtgccgaacagcacgtaccgccgtgggtgcgacacctcgcggcgatcgtacggtgcgcggtagacgtcctgcgtgtcggttgtccagcgcttgacgtcctcgacctcgcgcttgcccaggcccgacatttcgcacaactcggcgaccggcgaccgcgcggcggccatcgccattttgcgatcctcggtgaacgcaatttccgagggtagcggcacgcccatcgcctcggcgatctgcacgccgaacaggcccttacccttgcgttgctcgccaatcagtaccggcaccaccgggcacggggcgccggggcgcagctggcgcatcaccaagccggcgaagaagacctgaccggccccagtcaatgccgggctgcctggcgtgccgtacaagtccgtgaaaatggtatccagacgggcccgcttgtcccagacgggcaacgacaagacggcgtctttccacgggtcgaccggtcggccgcgtgccacagtctccagcgcggtttgcaacgtgccgactgaaaccgtggaggcgccaagacgggtgacagcttcgagccacatgccgatcgacggcaagtcctcgtcgttgagcttgtcggcgcagacgtcgtaggtgagcatgagaccggcttcacgcgcgagcagcttggtggcgaacaccagattctgcacgctgctgtggcgtttgtcggcgcggtcgggccattcctcgatcgtgccgcacagccgttcggccgcaagctcgagcgggtgtgatagctccgacgcatccgactccccgaaggcaaagaaatcccccagcttgtgcgaccacacgcccttgacaccgcgcagcgtgaccacctcggcggcgcgcaaatcgccacccgacaaatcgtgtcgggtggagtcgaacggatcggcgcaccgccggccagtggcttggtcgaaatgacgcattgcatcgccgaccgtcatgcgcagcggttcgggcgtgtgttcgaacaccagcggccaggacggcgggagcaccttgtcgcccagcgcgcgcagcgcaagagcgcccatacggtcgccgtcgtcgcgaccggccgctaacgcgttggctttgtggtagtccagtgcaacgcgcttggcctcgacgcgcatgttgttcttggcctgacgcaccgcagtttcgaaacgacgaatcgcgatatcacgcaccgccggcatctcttggacgtcgagaaacccttcattggtgcggtatttcgcgctcttggaggtatccgacgaacgcgcgacccacgcatgcgcgtcgggcacgttgcgcgcgatgccgtcgtttagcacgggtgccgcttcgaacatcagccgggacggttgatagaccagtgcgtcggaaagctggcgcaccagcaacgcgccggagcgcgacacgatgatgcggccgcggccggcggcccattgatcgatctgcagccgttgcgcaagcgcggggatgtcggtgccacgggtgacgccaaggtagatgtgaacgccgcgcagtccgcgatcggcgacgtacgaggatgccgaggggcgaccgacgcgcaatgcctggcgcagccacggagaagccgactccagcgcgtccatcacttcctcgactgagctgtagaccgaggtctcggtgtcgacatcgatcaggaacaaccccggggcatccgagtagcggaacgcttcattggtccgagccaccgcgtgtgggttgaactcggagccgcgtcgagtcgtgagcggcgtgttgccgacgatcggcaggcctgccgtgatcgcgtgatgcggttcgaggttgtccagaacggtgcgcaagtccagcagtgacgcgacttcgcgcacttcggcgaagccttcggtcatgtgcgcgattgccgagctcgtgaccttgccgtctttgagctcgaacgacttggccaactcacaagacgtcgaggtgatcagggtgaagcgaatcgggggtgttggggcgtggtcaggcatgtggtcgctctgtcatgtgggtgacgggtgtgtgcaggtcagtctgcgcttggttgtggggggctgtccagctctgcgccgactagccacataaaacgggcagtgagcccgagctgacgtcgcgggtaaccagcggtacggagtgaacgtccggtcgcgatggcctcgcctttggctggtgactgtttgcggatcagcaaaaacagctcctgcaccgagaaccagcctgcgttggtagaaccgaaggcagccacctcggccagcgtgagggggccgccggctttgttgggcttctcgaagttgacggtcaacacgcgccacccggcctccgcgttgacttcctgggcgtacatctgggctttggcgacgatatccatgtggtttcctgggttgtgaggtgcagtcgctaccttacatatccacagggcagttgtcaacccaaggtcaactattcacgcaatagtgaaccaaacgtactagatgccagaggataaagctcttaattctctatatttaatgccaatgaaaaaaaggaaatttaagtcgatataattcttttgatttcacgttttagatatagagaggtttgttggtactttgcgtctgttcctctgcgtcgtgtacttttggttcatgtggtgcgcgagcgtcctctagcattgacggggtccgcagcggcaagtaacctcgcgcgcatggcaaacgacacgctcgcattggacccggcagtttgggatctgacactggacgcctacggcaacgtcgcgacggtcggagacgacaccgcgcaagacgtgcaaaccgggccgggcctgcgcctggctcaagacgtagcgacccgtacgcgggcctggcgcggcgaggtctacttcgacaccgcccagggcatcgactacgacgcgtacctgggtacagctccgctggtcggccagctgcaatctgactttcaaaccgaggcactcaaggtgcccgggtgcgcgacggccttggcgaacttcgacctggcccgtacgccgcgagtgctctccggcacgttgctgctgtcggatcaggccggtaacggtgcgcaggtcgcggtatgagcttgcagcagattcccgtgcagcaaagcgcaaaccaagcgttctccgtcgtgctggatgaccgcaacgtacagatga

SEQ ID NO: 37 - protein, 206 aa, unidentified
  REGION 1..206: note = the amino acid sequence of tail tubular protein A of abacteriophage
MFISKLDVVNDALSCLGEAGLTDLQEDHAYRDMILGFLKAETDRICARGWWFNQEYTRLLPDANSRYVYVPEDVYSVVTPATGFQVTQMGRRMYDSRNRTYEWDKPIPVRLTRMFPFEDLPYIATEAIRDATTVKFQGRIDSDRETKADAMRTASLSMEQLVRLDAQNQKHNMLYRNGMERNAWIATNQQYPSGERDILGPNIIVH

SEQ ID NO: 38 - protein, 847 aa, unidentified
  REGION 1..847: note = the amino acid sequence of tail tubular protein B of abacteriophage
MSKTVGSLPSLVQGVSEQEPHNRAPGQMWESVNMIDSPTKGKARRRGTVYSDHIELPSAITAALVEARSQTEYTFIIDGREYSLIYRSRASTLGKDYFAQLLDKESGQFFDIVYEGSTWIDNLISGGVSAIACIGRYVYIAGNTTLPRATSTESWNSPDNLQKLAAWVREGAYSRKFTLVLYHVNGTKVEFAYTTLAAAYPELLDTTDIPFYKPGSNPQTADPEYQKRVNDRVNAYEGEKTAWIRKAAEDIVPANIAAKLAELAAQAGIIASSIGPCVVVDDPNYNDIRLLDDASNTLVSYAGREVSDPQFVTLYHWAGKIVRVRPSGGGDKESYYLKAVALEEGAVGWTKVEWVETAGVVHEIHNVVSQMVIDPALKTAYIAQNGEGLKSLAPQLGDHPVYKPNVVGDAVTAPLPHYFGRVITCMTVFQDRLMISADNIVNFSRSSDYLNFFRVTILNIQDNDPIEIFAHGSEGDTIKRAVMFERDLVLFGELRQYAINGREFLSPTNPNINVIGNFEGGVRAQPIASGNFLFFGKHANERTGLHQMQPGETAQTTIVYDVSQVLDTWLTGEPVQLLGTTMPNMITYRTDADPSIWYTYRYADEQGTGRVMASWGKQQYAPELGTVAAITHYRGDLFVITLRSAGGKDYWFADKLSLNVDMPRYPHLDSQVRYGQETPWHTAAASKLYVAADKSSDYFLLGAPRAGAAEFVEQAPGVESALVVGSISPAYFQPTNPYMRDSQGLPILNGRITLTSFGFHLADTGGLRAYVLKPDRERTLLFEGRVIGHSSNIIGRQPVFSGIRTVSVGRETRTCIIELRSEDWQPLRVTGAEWSGQVFMPRARGLY

SEQ ID NO: 39 - DNA, 621 bp, unidentified
  misc_feature 1..621: note = the nucleotide sequence encoding amino acid sequence of tailtubular protein A of a bacteriophage
  source 1..621: mol_type = unassigned DNA
atgtttatcagcaagctcgacgttgttaacgacgcgctgtcgtgcctcggcgaagcgggcctgactgacctacaggaagaccacgcttatcgcgatatgatcctcggcttcctgaaagctgagacggatcgcatctgcgcgcgcggctggtggttcaatcaggagtacacccgcctgctgcccgatgcgaactcgcgctacgtgtacgtccccgaggacgtgtactcggtggtgaccccggcgaccgggttccaagtaacgcagatgggtcgtcgtatgtacgactcgcgcaaccgcacctacgagtgggacaagccgattcctgttcgccttacgcgcatgttccccttcgaggacttgccgtacattgcgaccgaggcgatccgcgatgctaccaccgtgaagttccaaggccgcatcgactccgaccgcgagacgaaggccgacgccatgcgtactgcatcgctgtcgatggagcagctggtgcgccttgacgcacagaatcagaagcacaacatgctctaccggaatggtatggagcgcaatgcatggatcgcaacgaaccagcagtacccatcgggcgagcgagacatcctcggccctaacatcatcgttcactag

SEQ ID NO: 40 - DNA, 2544 bp, unidentified
  misc_feature 1..2544: note = the nucleotide sequence encoding amino acid sequence of tailtubular protein B of a bacteriophage
  source 1..2544: mol_type = unassigned DNA
atgagcaagaccgtaggcagcttgccatcgctggtgcagggcgtatcggagcaggaaccgcacaaccgtgcgccgggtcagatgtgggagagcgtcaacatgattgactccccgaccaagggcaaggctcgtcggcgaggcaccgtctactccgaccacatcgagctgccctcggccattaccgctgcactggttgaggcgcgctcgcagaccgagtacaccttcatcatcgacgggcgagaatacagcttgatctaccgcagccgcgcatcgacgctcggcaaggactacttcgcacagctgctggacaaggagtccgggcagttcttcgacatcgtatacgagggttcgacgtggatcgacaacctaatctccggcggcgtgtctgccattgcgtgcatcgggcggtatgtctacattgcgggcaacacgacattgccacgcgcaacgtctaccgaatcctggaactcgcccgacaatttgcagaagctcgcggcatgggttcgcgagggggcgtacagccggaagttcacgctggtgctgtaccacgtcaacggaaccaaggtcgagttcgcgtacacgacattggccgctgcgtaccctgagctgctggacacgacggacatcccgttctacaagccgggcagcaatccgcagacggcggacccggagtaccagaagcgagtcaacgaccgagtgaatgcgtacgagggcgagaagaccgcctggattcgcaaggcggcagaggacattgtgcccgcgaacatagcagccaagctcgctgagttggcggcgcaggcgggcatcatcgcttcctcgattggcccgtgcgttgtcgtggacgatccgaactacaacgacatccgcctgttggacgacgcgagcaacacgctggtctcctacgctgggcgcgaggtcagcgatccgcagttcgttacgctgtaccattgggcaggcaagatcgtgcgcgtgcgcccgtcaggtggtggcgacaaggagagctactacctcaaggccgtggcactcgaagagggcgctgttggctggaccaaggtggagtgggtggagactgccggtgtggtgcacgaaattcacaacgtcgtgtcccagatggtaatcgatcctgcgttgaagactgcgtatatcgcacagaacggcgagggcttgaagtccctggcaccacagctcggagaccacccggtctacaagccgaacgtggtaggcgatgcggtcacggctccgctgccgcactacttcggtcgagtgatcacctgcatgaccgtgttccaagatcgactcatgatcagcgcggacaacatcgtgaacttctcgcggtcgtcggactacctgaacttcttccgtgttaccatcttgaacatccaagacaacgaccccatcgagattttcgctcacgggtccgagggtgacacgatcaagcgggcggtgatgttcgagcgggacctcgtgctgttcggcgagctgcggcagtacgcgatcaacgggcgcgagttcctgtcgccgacgaacccgaacatcaacgtgatcgggaacttcgagggcggcgtgcgcgcgcagcctatcgcctcggggaacttcctgttcttcggcaagcatgcgaacgagcggacgggcctgcaccagatgcagccgggcgagacggcacagacgaccatcgtgtacgacgtgtcccaggttctcgacacgtggctgacgggcgagcctgtgcagcttctgggcaccaccatgccgaacatgatcacgtaccgcacggatgcggacccgtcgatttggtacacgtaccggtacgcagacgagcaaggcactggccgcgttatggcaagttggggaaagcagcagtatgctcccgagcttggcaccgttgcggctatcacgcactaccgtggcgacctgttcgtaatcacgctgcgctcggcaggaggcaaggactactggttcgccgacaagctgagtctcaacgtggacatgccgcgctatccgcatctggactcccaggtacggtacggtcaggagaccccgtggcacacggcagcagccagtaagctgtacgttgctgctgacaagtcctcggactacttcctgttgggcgcgccacgcgccggtgccgctgagtttgtggagcaggcgccgggtgtggagtccgcacttgtcgttggctccatcagccctgcgtacttccagccgacgaacccgtacatgcgggacagccagggcttgccgatcctcaacggtcggatcaccctgacatcgttcggcttccacctcgccgacactggcgggctgcgggcatacgtgttgaagccggatcgcgagcggaccttgctgttcgagggccgtgtgatcggacacagcagcaacatcatcgggcgacagccggtcttctccggcatccgcaccgtaagcgtaggccgcgagacgcggacctgcatcattgaactgcggtcggaagactggcaaccgcttcgcgtcactggcgctgagtggtccggccaggtattcatgccgcgcgcacgagggctatactga

SEQ ID NO: 41 - DNA, 43667 bp, unidentified
  misc_feature 1..43667: note = the genomic sequence of a bacteriophage
  source 1..43667: mol_type = unassigned DNA
cgcgcccccgtacgcccacccggtacacaccgcacgcatcacacgcgggcgcgagacgatgcacgcgcgcgtcgcgagggacagccttgacgtacccacatcgatgtgctaccatcgcctcacacgcgcacacacgggcgcacacggcatgcgcgattcctctcccgacatgggctgactggcattgctgaatcgattcacaattctcccgtcgaaagtgcttgacatggccgacggcatgccctaatctacacccatcgcagcaacacaccgctacgacgcgacacagggcttgacacgggcatcgcagtacgccatgatggctcccatcgacaccgaacaccgggcatagtggcggcgcctacaagcggcctagaggcacatagcggcggttgcgtattctctcacgggttacgctagggttgagcgcacaggcgggacatctgtttcatttgctccctggtcaccatacggaatcacgaacatgcgtacgtacacagtcagcatcatctgcggtgcgttcggtcaggagaccggcgaggttcgtagcttccacgctgaggcccgtgatagggaagaggcacaagaggtggtgatcggctggatcgagcaggctagtatgtggcacgctgaggtgcagagcatcactcgcaccagctaagcatacggtaagactcacgaccgtatggtagagttgaattggtacacgtacaacagatagaaacggatcgtcttcacaagattcgtatctgtctttagaaccttcacggttagctccacagtatgcttacggtaagccttgacagttgccactgagcaacgtaagataggcccacagtcagcagacaccgacgacatagacagtagcttagacaggtacttgacattagccggacagtaagctaacctagcaacacagtaagtaacgcagcgatcctcgcagtgagacttacaagagacttgacaacgacctgcgggtcaggcacaatggatgccagatgtagagagtacgatctgactcatcggaacagtcgtgattgtatgacttagggctgaggctcgacggtcaacagacgattgaactaacgacagatcacaacgcggatgacgtaattgaatgcggcttagtaaaccgcagggaccactcgcaagagtgccgcgtaagctacgacagtagcactcatcacctacggtggaagcccgtcaagatgagtaagtcagtgtagtgctgacaggtgcgtcaaagaggatagcaagggtgggtcataccatctgcgcaacaagggacccgataggttctttcccaccgatggcttagtgcctacggttatagattcacccgaatgtataggtgcgggtcgagccacagcgatgatcgccaagagccgacgcatctatatttttgggttgaatcacaagggcattagtcatagtgtccttgcctttcaacctatgaggctaacgccatgacattcaagcagcttatcaaggggttccgcaagagccgtgttgtgctggacctgcgcaccactgcgcaagagcagcgagtcgctgacatcaagcgtaaggcgcagcgctacgagaccctcaagcacaccgcaggtaagccgagcgtgtatgctgaggaggccgcacgcttgaaccgcctgcgtgctgagttccgggctgacgcgagggctttcgcatgaagcgccgcactgataatgcactggcactcctgctgctcgtggtcgtagtgttcctgctgtggcagacgttcaagccgcagcccacacccatcgatgcacccaagggcgaggtgatcggcgcgctgccaagcggtgcgctcatcatgttcatcgacaacgagaatggcgtggcttgctacagctacctcgccgctatctcctgcgtgaggctacgttaatggtcaagccacgtatcaaggcggacccggtgctttcctggacacgtgagagcggcgagcgcgtcaccatctacagcgtataccacggtgaccgccaggttatgggctccgctggggatagcgtgcggaagtgttggcactggtacctgcgtatgcttgaggaccgaccgataaagctgcgaggtaaggactgatgagaaagccgcgcctatacctgagcaagaaccttggttgggtagcccgtcaccacccttggctgaccattaaccaaagcgactggctgttcgatctgtgcctacagctggacgaactaaacggtgtggtcatatgatcaccctcgctgcacctcaactggcggtgcttctctgcatctctgcactctcaggctgcgcattcggcatcggcctgttcctcatcgtacatcacaagtgagacctatcatgaccgcacatatcgaacgcaagatcaaggccatctcccgcctcggcaagaagatggacgccttcattcaggacactgccttgcaggtggtgctgcactgccacacccacggggaaatttccctgctgcacaagttgtggtccgccatgcaggacttcaagggcgcacgacacaaggcgatggacgagtggatgaagcgcaatgcgccggttgccctggtcgatcccgacaacatccccgacgacaagttcccgttcacgctggacaaggatcgcctgctcgatgaggccgggcgcaatgccctgtgtctggcgcagggtacaccggccaaccactggtacaacatgaagcccgacccgaagctggtcgaggagctggacatcaacgccatgttgaatgccctgctcaagcgggtggacagcgagagcaagaagaacgcagacctcaagatcaagggcgaggacatgctgcgcaagctgcgtggcctggtcagtgctgattgatctactgattggaggtgcgagtgtcgccgtgatgctcgcacttatcctacacctcaaccacatagaacaaatcgaggcacgccatgagcgttctgtatcactacagcaaggggacacttgagacagcactgattgtagcgtgggtggtgcgcgacaacatcaagctagccatcacgcagggagaccacgggacactgaggtacggcatctgttccgagtgggacgacgtggccgatgggcacaacgaggagtgcatgctcggtcgcatccgagatgggctgtactccgaatggccgcagttcagtggaagctcatggtatcctatcccgatgccagagctggacgaggacgactaccagacctaccttgcgtcggtcgatgagttcgacgacccgatgccccggcctcactggatgtacgagcaggtcggcaacatgtgggacggtgagtacggcgcgctgcgcatggactgcctggactggatgatcgacacgcttgagaaagctgtactgtaacagcccgtgcccttcgcaagaggggccacggcgatgcacactacccgcatagcgcagccgggcttggcctcccggtaagatcgctggacgcctagtgtgcatcgccgtgcgactggcacgataaccgaatgacaacgacatggcacaggtaactgtgaagttcaagcgcaaccgcgagacgcgcaccaatggattgcaggcgtggcgtgtggaccgcacgttctacatcactcctgccacgccgtaccttatggcgcaggctgactaccgcgaagcctttcgattctacgggatgatctaaccatgaaacactacgactatgcacacgagggattcaatggcaaccgtgagaaactatctggtccaatcagccgccgtagaaatgctcggtcggatggcgcagctctgcgacccgagcgtcatgctgcgcgaaaggcagggcaagaacaccggcgggccaagcggtccgatccatcgtgaggtacggctgcgcaaggtagtcgagcggctggacctgcgcaccggagagcaagtgaagtacatccacgatccagacatggacgtgggaagctgggaggttgcattcaacgtgcatgcaatcaaggatgctacgccgttcaccgatgagggagtggccgcgctcaactgctacggcatgaacaagaccatgctttatacattaaccgaagaggagtacgacgatgggcaagcagcgtaagggttacgtggttctgtacagcaccaatgatttggcgcaccacctcaccgtgtcacgtgaggactacaccgacggcaccaagttgccggacggactgatgaagttcgttgaccgcatccaaggtgacgacctgctcgccttgctgcccgagccgcaccagtcccagcgcgcagagggtatgagtaccttcaactcgtacgcactgatcacccgtcgtgctgcggcgcgtgccatcgtgcggcgcatgaacaacctgcgcatccacggacgggatgacttcaagctgctggaagtgggcgagttcgaccgcacggtcaagccggtcaagcactggaacatcgagcgccgttactgcctggtcggtggcaagtggagcgactgggaagtgtggagcaagggtgtctcgctgcgtgccgacgctcgcaagcaggccgcgaaggacgagcagtactggaacgaccactcttccaagggcggatacaacctgagctacaagttccgcgccgtgccggtgtacgcatgagcatcctgtcccgcatgaaaggtatgtgggctgggctggtgtccatgctgagcgacaccgaggaagtcgcgccgaccaagccacgcattgcactgcacgaacggacacatcccgacgtgcgtgctgcgttcgaggcgaacccgaactacgaggtggtggacgacaagccggtgcctcggtctgtgttgagcagactgttcgggtacgtgccgagcgcagagccctatatcaggctgcgaggccacggctacgtgcagggcgagacgttcgacgtgggcatcaaccgtgccaagcgtgcgatcaaggccatcaaggacaagcgcgagcggcgtgctgctcgaacccgattcatccagcggctgcgcagcagcggcatcaagagctaaggagtacacatggcacgtgacatctcgaacttcatccgcatcgccatcccgcatggtgcgtggtcggccgtcatctccgaagctgcattgcaggtgaccaaggcggcgggcggtggtacttcgtgggtcggcactggctcctggtttgacgaccagggtgcaggccatcacgaaaacatccgcatcttccagtggaacttcgcatcgcaggaatacccgcaggtggactacgctgcgcgtcagctggtcgagcgcatcttcgaggcgggcgagaaggccgtcatgaaggaacgctactacgacctgggcgtggcggagcagggccgcaccgtggcagggtacgccactcgcattctgttcgcaccgaccaagcactgagccacacctagcctaggtataaggccccgaccagctgggcgggttatcccggctacccatctctcactacacaaggaaccacaacacatgtcgaacaacatccgctccgccgctgacatctccgcccagatcgacagcatcaacgccgatgccgagctgtcgcagaccccggccgatggtggcctgctgagtgtcctcggtctggaagccaaggcccgcgccgccatccagaagttcgaggatgcatccgcatcgtacgctgcgcaggccgcagtgcgcgacgtgaagcagggcgatgccgtctcgctggtgttcggccgtgccgccaacaagcaggtgctgtcgggcaacgtgctgagcatcgagaatgcgaagaccggcctgctgttcaccgtgctgaccggcaccggcgctgcgtcgaaggtcgtcaacgtcggcgccgatgcgctgctgctgtcgccggaagccgtgactgccgccgaggaaagcatcctcgttgccaagctggaagccgagcaggaagctgccgccaaggctgcggccgaagccgctgccaagggtgaagccccggccgcgtaacatctgattgcggtgtcctcttgtaatgagagggcactgcgatgtgcactgagtagaaacgcagcccgtgttggtgcacggagtaagcgcccgcgaaggggactagcctaatgcaaagtaaactaccaccacagtgtgcatcgcagtgcaactccgcactatcaaggagaatgaaatgagcaagcagttcaagaagtacaaagcctgcaccacaaacagcaccaccggtgagctgacgcgcgccgcaaacccggaagcgtcgttcggagacactgcgtatttcgtgtacccgaccgactacaccgagaccaaggtgcgcaagctgatcgccgccaagttgaatcgcgccgaggactcggtgttcgtgaaggcatgcgagatcgtggagttcgtctgatgcacgacctcatccaccaactgtcgaacgtaggcatgaccgtgctggtcatagccctgctgttcatggtgctgctcaactggcgcatcgcagtgcagctgccgctgttcgccgagggcctgttctatctggaacggcagagctacgcacggcgcggtgccttcggtctggttatccagcgcgaggcacggtgggcatacgctgtgttcttgctgggcacgctgatgctgtggccggacatcgtgttccacctgtggtacctcatcggcaagctgttctagtgtatggccttcgccttcgagtaccgcgacaaggacgggtacgtcacccgccgtactgtggaggtggcgcagtatagtgcggagcatctgatcgggtactgccagttgcgcaggtcacgacggacgttccgcattgaccgcatcgttaactcggaagtcatcgacacaaccacaggtgaagtcatcgacgctaccaccggagaaataaaatgagtcacctcgcgcctgacgagtggttgccgcaggctgagcgcctgttgattggcggccgcaagtcagcgcgcggcgaccatgcatgtggtgaaccgggctccctcatgctgacgcgcgagggggcaacactcactgcctactgctttcgttgcggtggggtgggcaagcatactacgcaggaagatcccaaggaaaagttcgagaggttgcagcggcaggcagtggcggatgagttcatgcgtaacgcagtggaaccgccggagccgacgacgtacaacccggccaagtggcccgagcgtgatgcgttgtggttctatcgaatgggactctctccccgcaggatcaaagaactagggctgtactacaacgctgagtccgggcgtgtggtgctaccgatccgcgaggatgatcaagtggtgttctggatggcacgatcacagacggccaagcccaagtgggtaggtccgagcgtgaagaagcgtgggctgttcgccaagtacggacaagggcgaggcgaccacgtggtgctgacagaagacccactcagtgcatacaagataggcttggtgtgcgaggcttggtcactgctcgggacgaaggtgcatagtcgccacgtcttgcagctgatggaacttggtaagccagtggtggtttggttggacgacgaccacgaccactacaccggcaagaaccaagggcagatagcggcgcgccaagtgattggtgtgctgcgtggtgcgggcttggaagtgcagaacatgaccagcccgaatgatcccaagtactactcacagtaccaactaaaggagatgatgcaatgtctttccgtgccgcaatcaaacttgaccaactacaggacaagctccgcgcaatcctgagcgaccacgatgcgtgccttgtcacgaagaacaccgtgtacttcaatcgcttcgatgtgcagggactcaacgaggcacttgaagttccgaaggaagtgcctgtgtacgaggtgaacgaagtgcacagcacgaagttcccgacctgcccgccacgatacaacgtgactcggacatacaagggcaagccgcagttcgccgcaggcttcaagagcaaggcggatgccgacgagtacacgaagcagaagaacgcggccgctgcaagcgaggtggcggatcgatacaagctggagcaggtgagcgccacttggatctacgtgcgggatacctccgacaaggggctgatcagttcggtggttgccaagttctctaccaagcacgaagcgatggcgcgagaattcctcaagcgcatgaacgcggagtaatcaatggagcgcagcgagcacaccttgctgcgcctcgggctggatcgaaagacccacaccaaactgttcgacatcatccccggctctgcgctgacgggtaatgtgcttactctttgggaggcgcagcgtaagttctatgccaagttcaacacggacaagatcaccgacatcccggcgtggctgacgtggcttgaggaccaccagttcgcaacgatgaaggacccggatgcgaaggagctgctgctcactatcgcgggcaagctcaagtacggacccatcgatgagtccatgatcccgcagcttgccaacggctacatccaaacggcgttgagcatggaggtgatggacatcatcgagcggttccagtctcccgacaacgaggaagacctggacgtgatgttggtcgcagccaacgagaagtacaagaacttgatggagcgcagcgttcagtcgcccatcgagagtaccagcatggacgacctgtacgaacaggacagcatggagtatgggttcaagtggagactgcctgaactcgcacagcacatgcgccccgctcgaccgggcgatgcaatcgtgtgggctgcgcggcctgaccgtggcaagaccacgaccatcgcaagcgagatgagctacatgattccgcagatggacctcgtgtatcctgggcagaacaagtccttcatctggttcaacaacgagggcgatagcaagggcatccgccgacgcttgtatcaggcgttgctcggtgtgccgcagtcgcagatgatggcgtggcacaaggatggatcgctgctcgacaggctgcacgaagcagcaggtggcaagcatctgttcgaccgcatcctcatcatgtccatccacgggtatagctcgggccaagtcatgcgcctgatcaaggagcataaccccggcctgtgcgtgttcgacatggtggacaacatccgcttcaatgggctgagtacgaacggcggtacacgtacggaccagatgcttgaggagatgtacaagtgggtgcgcgacgccgcaatcatcgaaggcttcgctgcctttgaaacctcgcaggtatcaggcgatggagagaacgtgcagtacccgctaatgtccatgctcaaggacagcaagacaggcaagcagggtgcgtgcgatgctatcgtaatctggggtgagcagtccggcaacgagcgcggcaggttcctcggcatcccgaagaacaagctggtcgttgaaggtcagcctatgaacccgaagaaggagtgctacttcatgccggagattgcacgcatcctgtcattcgatgaagtcaacgaggagtaaccatgagctactacgaacccgaggaagaaacagatgagtcttaacagcgacaacgcaacgcaggttcgtcacctgtccgaaggactgttccgcagcctgggcaattacacagcccagaggcagcattcctacagcatcccgcactcgaacttgtaccggtggcgtgacacgctgaggaagattggtttccttagcacgaccaagtatgagccgaagcgcaaggtgcagctgctgttcaatcgccacgcactgtgggtcggcgcgcactacagcaagtacaaccgcaggctgtgcatcaacctgctgccgggcgtcaccatctgcatcacacaggcaggcggcatcgctccttaatcaaccgaggatcaatcaaccatgagtaagtacctcgcatgggacatcgagacagggatcaagcgtgcgctcaagcgcaaggccactcccttctacaatgagaacctagtgtgggcgataggctatcgcggatctggcgtgctggataaggtgggcttccatcgcggagtcgatggcataccgcacaactacttcccggacatgctgagcaagtgcaagatcctggtcgggttcaacatcaagttcgacttgctccacacactgcaagagccacagaactacgaggcgtggaagcgctgggtcgtggacggaggcatggtgtgggactgtcagcttgctgagtacctgatcgagggcatggacaagaagtggcacatgcccagcatggatgaggtggcaccgaagtacggcggcaacctcaaggacgacgcgatcaaggcgtgctggaacaacggcatcgacacgccggacatcgaccccgacatgctgatggactacctcatggggaccgacgagcctggtgatctgggtgacatcggcaacaccgaggcgatcttcaagggtcagctcgacgtgctgcgtgcacgtggtggtatcaagtccgcgatgctcaacatgggcgggctgatgtacaccgtcgaggcagaactcaacggcatgaagatcgccgaggctcgggccgaggagctgcgtgttgcactgctcggtgagcttgaggaggtgacgcagcgagtcgccgcctacatcccatcggatctgccgttcgagttctcttggtcgtctcgcttccacaagtctgcgctgctgttcggtggtgacatcaagtacaagcagcgagtgcacaaggaggatgaccagggcaacaagctgtacgccatgtcggacgaggtgcactacctgctcaaggacggcacgtcgaagaccgaggaggagatgaccgattgggattggggcaacgccgagcgcttcgccggtggtgctaagaagggacagcccaagaccaagaaggtcaaggtgcccgaccttgccaagcccaagatgacgaccgaggatttctactacaagttccccggattcgttgagccgctcaagtcctgggcgagcagcacggatggcgtgtactccacggcgagcgaggtcatcgaggcgctgggtacgtgggaagatgcgccgcccttcatcaaggactacgccaagcaggcgaagatcgcgaaggatctatcgacttactactgggtcgaggacgaggacggcaaccgcaagggcatgctcgcattgctcgggccggacggtatcatccaccaccagctcaacatggtgaacacggtgacggcgcgcttgtcatcgagcgatccgaacttgcagaacattccgaagggtgacaagtccgacgttaagacagtgttcgtctcccgcttcgagggcggcagcatcgtgcagtcggacttcacctcgctcgaagtgtatgtgcaggcgaacctgtcgctcgacaagaacctgatcgccgacctcaagaccggcatggacatgcactgcgtgcgtgtggctcaggctcacaagatggactaccagtatgtgctggaacgtgcgaaggatgaacaccaccccgagcacaagaagttcaaggcgctgcgcaacaaggcgaagaacttctcgttccagcgtgcgtatggtgcaggggctgcggcaatcgcagcagccacaggcatgacggtcgaggaagtcaaggcactgatcgaggcagaggagacgcggtaccctggtatcgtgcgctacaacgacagcaacttgcgcatgctcgaacgcaatcgcaagccgtcgtctctgttcgtgcagcacgacgaggttcgcggactgactgtcaacctcggcaagtcctacctcaccacgcctgacggcaagcgctacgtgctgtgggaatcctgctctccgaagttcgtgtatgagcgcgaaggcaagacggccacgttcaagccaaccacgttgaagaactacccggtacagggcatgggtggtgagtgggccaaggctgcgatgtggctgctggtgcgtgcgttctacgagcaggacaactacggcggcaaggcgctgctggtcaatcaggtgcacgacgcagtgtatgctgacgtagcggaggacgtacgcatcgacgctatggccctcatacatgcgtgtatggaggaggcgagtgtgctgatggagcagcacttcgactggaagatcgccgtgcctgtgcccactgagacggtatacggcacgagcatggcagaggaacatggcgagcctgccatgcgtgaattggtacacgtacaccggaagcacattcggtcacgttacctgaaagattacatcccatcatttgaacaggagaagaattgacatggcactcaacgcagcaatgaaggcacgcttggcgaaggcgaagcaggtcggcccgaacatgaacgaggcgcagcagggcggtggttcgtacaccccacccgctgagggcgttacccgcttgcgactcgtcgggtacttcgaggtcggcgaacacacggagcagtccggcaagttcatcggcaagaagaacaagaaggtgcagctggtgtgggagctgagcggcaagaaccacgagccgaccgaacacgatggcaagaagatcccggtgcgtatgacgcaggatctgaactactcgctcaacgagaaggcgtcgttctacaagctgttcgtggaactcaacgcgtgccacggcaacgaggccaccatcttcgccgagctgctgggcaaggaattcctgggcaccgtggtgcacaccaccaagggcgagggcgcagccaagcgcacgtacgccaacctcaccaagatccgcaaggccgtgcgcttggacgaggacgacaacgaggtgccgatcaaggttgacgagccgatcaccgagccgaagttcttcgtgtgggacatcgccacgatggaagactgggacgcgctgttcatcgacggcgagtacccggagcgtaaggatgcggcgggcaacgtgacgcacaaggcgcgcagcaagaacgtgttgcaggagaagatccgcagcgcgaacaacttcgactccctgcccatcgccgagttcattcgtgctggtgtcagcgccgaggacgaggcggacatggacgatgcgctgggcggcgacgacaatggcgatgacatcccggacgacgagtcgcagcaggagcagcgcgaagtcccggcaggtcaggccgacgttgacgatctggtctaagccatgactactgcggccgagcgtttgaaagaacacgcccgtaacgcaccgatgccgggcaccactgcccggccttcggtcgagggcatgccactccacatcgacggcgactacgccgcctactactgcgcaggcaacgacgagacatcgccgggcgtagctcgcgagaacctgctgacccgcatcgagcgcgcgaagcaggtgtccggtgccacccgtgccatcgtgcacctttcggaccgagcgtgcgacaagggcctgcgcttcttcatcgcacagtccaagccgtaccagggtcagcgcaacacggggcgcaagccccagaactgggactacctgcgcgagtacatggagacgtacgacggtactgcgttcgaggtcaagaactggtgcgaccgcgaggccgacgacggcatggcctacgtgtccgaagcggcgtacaagatcggcaggcccggtgcggtactcactgcggacaaggacatgcggatgttcgcaggtctgcacatagtgtggaagaccttcgagatggtggaggttctgcctggcacgtacgacctaatgcacgacggcaagcagtacgggcacaagtggttctggactcagatgcttcaaggcgacaccgctgacaacatcatgggcctgccgcgtgtcggtgaggttgccgctgtcaaggtgctgggcggtacgaagtcaaacgccgatgctttcccgctggttctggacatgtacaagtccaagatgggcgacgcatatgccgaccactttgtggagcaggctgcgctgctgtggatgcggaccgacaagcaggccaacgtcctcaacttcatggacctactcgcgggcggttaccctgcgaagccgtggtccgaggtctggggcgcagacgtggtgcgcgcagccaagcgcatgtaccaccgtgtgatggaggaacgcgatgctctctacgcctcgaaggcttaaagcatccgaggttgcaactgtgcgtgcccgcattgccgctgagcagggcgggcgctgcaagttgtgccaaggaaagctgggcttgaaagccccactcgatccggttctggatcatgaccactcaaccggtgccctgcgtggcgtactgcacagggggtgcaactccctgttgggtaaggtcgagaacaacgcaggtcgctacggtgtgtactcactgttcgcgttctgtcacggactcgcaccgtacctgcaagcgcacggtaccaacataactggtctggtccacccaaccttcaagacgcctgacgagaaacgtctcgctcgcaacgcgaaggcacggaaggctagggccgcaaccaagaaggaacccgcatgaaagtcacattgaaacaactgctcaagcgcgcaccgaagaccggaccgaagatcatctgcctcgacatcgagacattccccatcgagttctggggttggcagatgttcaacaacaacttcggcgttccgcagatcaagcgggactggtcgctgatgtcgttctccgctgaatggctggacgacgacggcaacttctacatcgaccagcgcaaagagaaggacgtgttcgatgaccgcaagcaggcgcaggccctgtgggaaatcctcaacgctgccgacttcatcctcgcacgcaacggcaagaagttcgaccttcgcaagatcaaggcgcgcatggtcatcctcggtttgccgccgctgtcgcctatcggtgtgatcgatccgatgctgctcaaccgcgtggagttcgcgttcacctcgcacaagctggagtacaccaccggcgtgctggtgcctgagctgcgcaagtacaaccacaagaacttccccggcttcgagctgtggatcgcatgcatgcaaagcctgcctggtgcgtgggatgagtgcgaggcatacaaccgcgttgacgtgtccggcatgaaggccgagtacctcaaggtgcgcggctggtactcgcagcatccgaacctcgccgtgtactacaagggcgacggcaccctgcaccgctgcaacaagtgcggccacgacgagatgatcccgcaggacaagcctgcgtacactcaggtcggcacctacctgctgctgcaatgcacgcagtgcggcggacatagccgcgcgcgtcgcctcaccaccaccatcgaacagcgcaagcacgtcaccgtgcccgcctaacaggagaactacatgagccgctttctcgaagcataccgcgttcaggtcgtaacacccaaggacgtggagaacggcgcaaccaagggaggcatcctgtggatgcacagtgaggtggaaggtagccccggctacttctacttcatcgactctccggactccgaccagggcattcccctggcggcagcacaggttgtgcgcgacgaagactgcaagcgctacgaccgctacctgatcgagaagcccgagaacgcgggtaccgaaacgctctcgacaccggcccccgaattggtacacgtcagcacgccggagcctacgcttacggagaacccgtacgccgacttcggtgccgaccatagcgtggggccggtcacgctccacgcaccacctgcatctcgtggtggcggcttgaagttcgacgccggtaaggtccgcccgtcgctactcatcaacggcatgccgcgtgcgctgctgcgtgtcgccgacgtgctgacgttcggtgcgcagaagtacgaggcccactcgtggaagaaggtggagaatggcgaggagcgctacaacgacgcaaagctgcgccacatgttcgccgaggccctgggtgacaaccaagatcctgagtccatgatcgagcatctggcccacgaaatttgcaacggcctgttcctgctggaaaaattcctgatcgccaaggagaacgcacattgagtaactccaccaaagacgcagcccgcctgctcaagtacaccaaccagcgcgttgtgctgggagatgagatggatgacgcggtgacatacgccatctcccaggtcttcgtccgcgcttccgaggatgcgcaggcggacatctatgcagccgtccgcgagtgcttcgatgagtacccgaatggcaccagccgcaagatcgcagtggtggacaagctgcgtaagtaccagctgagcaggatctatggctaagcaatcgaaggctcgcagcgtcaaggaagcaggtgtcaacatcctgatcgggtactcgataaactactccgcgaatatagcgctgctccctgtgttgtgggacaaggaccacccgttcctgagcgcacatgctgtaggcatcaccttcacactgatcagcttcgtgcgtcagtacatcatccgtcgttggttcagcaaaggagactgacatggcaaagaccaagtacatcacccacaccgcatgcgagttggagaaggtgccgaaggctgcgaagatcggcgaggccatcgccttctacctcgtgcagttgaagtacgacggaatctgcggcgtgctgatttacctcggcccggatcagtggtgcttccgcacacgtaccggcgaggcggtcaacaacttcaaccacatcggcgaagcgttcgcatctctgccgttcgatgtgttggccgaacaggttgcgagtacgttcgaggccgacgagggcgaagtgcttcccgatcagatgaagcgcggcgtgtacatcggcgagttctggcacccggactttgcagcgtccacggtcagcgggttcaataacctgacggacccggccaagatcgccgccgcccaatccgacatccgcaaggtgcagttcgttgtttgcgacttcgttacccacggggagtacatggcggggcgcagcgacgtgggctttgctgaccgcatcggccgcatcgcctggatgcagggaatctaccatcccgacgacggtggtgtgctgggcaagaatgtgcagccgcctgccccgcccatctggttcgccggtcacgagggctacttcaacgagcaggccgcgacggacgtgtacgccctggccgacgaggccgtggcttccggccgctacgacggcatcatcttgcgtaacgagaacggcccctggattcagggtgcgcgcgatgaacacgtggtcaaggtcaagcccttcatcacccgcgacctgctggtcgtggatgtggaagaaggcaagggcaagtacaagggaatgctcggcaacctgatcgtgtcgtacaagggcaaccgcatgggcctgtctggcatgtcggacgctgagcgccgcgagtggtgggcgaaccccgcgaccatcatcggccagatcgttgaggtcaaggccatgagtgagagcgtcaagggagtgctgcgcgagccgcgcttcaagggcatccgctacgacaccgaggtggattcatgagtgacgtgcacgtcgcaatccaccacgtgctcgaagaccagaccatccgagtgatgatcacaatcccgttccatgagtacgggcaatcgctgttccccaaccagtacctcaaagacaagatcaacgaggcggtggagcagattatggacgaagcacgcaaccggagataacatgcagacgcagctggaactggaagaagagatgtacgcctacggacgtgtccggatggcagacagcattgccgccaacgaagagaaggggcgcgcagaagcaaacccttacgctcagaagttgtaccgcaccttcctgttcccactgcgtgacgtgcttgtctccgagctatcggagaagaagccgggccgcaggcaggcgcatgcggctctgctggatgggatggacatggatgccgttgcgtaccttgcggtgcgcagcgcactgagcagcgcgatgcaggacattagcgtccgtgctgtggctatccaagtaggcaaagcagtgtaccacgagtacctgctgtgccagtttgaagacaagaatccgaagttgttccactacctactcaacgacatcgaccgccgcatgtcttcggacgagcggtacaagatgaacgtcatgcgcaaccaggccacgaaggcaggagtcgagttcaaggagtggggcaacgcacacgtgcagcaggtcggctactacctcatcgacaagatggtgcaggtcggcatgttcgacgtgacgaacaacagagagggcgcgctgaaccacgtcgagcttaacctgacggcagcagccgaggccatcgtgtctcagatcaccgagttcgtaaccgagatggcaccgtactggacaccgtgcgttgagccgccgaaggactggacatcgatcgatgagggcggctaccacaccgagggcatgcgtcgccttgatccctacctcgtgcacacgcacggcactgctcgacgcttcttcgagatggcggacatgagcaaggagctgcgctgcgtcaatgcattgcagcgtacggcgtggcgcgtcaaccgcgacctgctcgacatcgcgaccaacgtgtcgtatcacttcgacatggaagagatcatgatgcaggcggatacgccgaagccgcagcgtccgacgtggctcaccgatcagaaggtcgatgagatggacgaggtgcagctcaagtcgttccgtgcatggaagcgcgagatggcatcgtggcacaccgacaacaagctgcgtaagctcaagggctaccgcttctcgaacgtcatgaaggaggcgcgcaagttcgctgagtatcctgaaatattttttgtctacttcatggacttccgtggtcgcaagtacgtcaagtccaacggcattagcccgcagggttctgacttgcagaaggcgatgcttgagttcagcgtcggcaagcccctgctcacgcagggtgccaaggactggttcatgatcacgggagcgaaccgcttcggtgtggacaaggtagactataaggatcgaatcaaatgggtactggacaacgagcatctgattctggattgggcacgcaacccggtggactcgccggactggatgaacgccgacaagccgtttcaattccttgcgtggtgtttggagtattccaagtggcgggcattcggggacaagttcctaagccggatcagcgtaggaatggatggctcgtgcaacggcttacaaaacttctccgccatgcttcgcgatcctatcggcggaaaggcagtgaacttactcccgtccttgctgccaaacgacatctatcagatggttgcggaccgtgctatgcagctgttgcaggtttccgaggacgactcgccattccgcactatgtggattgcgcacgtgttaacgcggagcctggtgaagcgatctgttatgaccctcccgtacggctcgaagcgtacttcgtgtaaggacttcatcatccaagactacctcaaggctgggaagttcaaggagttggacccgaaggactacgagaaggccgcagcgtacctgagctacaaggtatgggaagcaatcggcgatgtggtcgtgaaggcgcgcgaggcgatggattggttgcagcagtccgcacgtgcgatcatcaaggcgggcgacgagaacatccgctggatcactccgacggggttcccggttgtgcaggtgtacttcggcacggtcgagcatcgcatcaacaccaagctcgcgggcaacatgaagatcaaggtgctgacggagagcgacgaggccaacctcaaccgccacaagaacggcatcgcgccgaacttcgtgcactccctggacgcatcgcacctgacgggcaccacgctgcgctgtgtggacgagggcatgaccgccttccacatggtgcacgacgactacggcacccacgcagcggacgccccagcgatgtacacggcgatccggcaggtgttcgtggacatgtaccagcagcacgacatgctccaagagctgcgtgatgcctacgtgatcctgtccgcaccgcccgagcagggcaccctggacctgacgcaagttcttgattcgccttactttttcgggtgaggttagtttcagtacacgtacaacagatagaccggctccccggctcgtgcttcggcatgggtcggggagctttcggccgtccgcattttggtacacgtacaacacaggagaaaccatgtctctcatttcagtacccgtcccggcagagaacctgtcggcggaagcgatcaagaagatcgaagccaagctgggtggtatggcgaacccgcagatcaatagtggcaccacgcaccttgaggctgggcagaagctgggcgtacagttggtgctgcgaatccttcgcgatggttggcacaatcagtaacttagcgcatctctgcatctgtctttaggtaccattagttagcttacataggagatagatacatgggattgagtagcctttggggcggaggtgatgcgaagcgagcagcaaagatgcaagccgacgctatcaaagcacagactgctgcgactgtacaacaggcaggtctggctgctgagcaagccgctaatcagattcgcaatacgatgcttaccgagactgctacgcagtatgcgaagactctcctcggtcggccaatggaacaggtcagcgtacgtctcgctccgcaagagcagatttctacgactgatcgcacccaacgtcagcgttctgtccgagacacttacatgtccggtggatcgtggttcacgtgaggagtaaccaatgaatcacttagtcaatacggctggtgcccgctgggctaagctggacggtgttcgtggtaacatcatccgtcgagccgaacgcttcgcaaagtggactatctccaaggtcttcccggacgatagctacaaccagaacaacgaggccctcagcaatgagtggcaatcccttggtgcgcaggcagtgaaccatctcagcaacaagctggtgatgaacctgtttgctccatctcgtcccttcttccgccttggtcctaagaaagccgccaaggaacaaatggctaccattgcagcggaacagaagcgggctatggagaataagctgtcggtggtcgagcgcgaaagctccgacgtaatcgaccggctcgcactccgcgctaagctgtacgaactgctcaagctcctgatcatcaccggcaatgcgctgatggttctcaaggacaagagcatgcgcgtgctgactatgcgcaactatgtggtgcgccgcgatgtcaatggctcgatcatcgagatgttgattcgcgagaaggtgcacaagtcggagatggatcaggatgcgctgacgatggcgttgcgctccggccagttctctcttgacagcgagggctgcgcccatcacttccgatggatcacgttcgacagcggcaagtttcgtgaggatcagtggtacaacgacttcaagctaccggcggactactcctcaagctacaccaaggagcgtatgccgtaccatgctgtgacgtgggacctgacatcgggtaaccactacggtactggcttggtcgaagactacaagaacgacttcgcttgcttgaccgcgctgtcgcaatcgactgtgttggctgcgatcatgaactccgagttccgctgggtcatccgcgcaggcgcaatgacttcggctcaggacttggcgaacagccgcaacggcgacgtgctgtacggtgagcagggtgacatcactccgctgccttccggcatggaagccaagatcgaagcgaacatcaacatcgcacagcagtacgtgcaacgtctcggcgctgcgttcctcttgcagtctgcgatcactcgacaggctgagcgcgtaactgcgcaagagctgcggatgaacgcggaggagttggagggcggcctgggtggcgcttactcccgactggctggtggcttgcaggttccgcttgcggacttctgcctggactacgccggttactccgtcaacgagacgaacttcgaggctaccgtcatcaccggccttgcggccctgtcccgtgtgggcgaccgcgaccgtctgatggagtacctgcaatcgctcgcagcggctgcggggcttccgccgatgatgctacagcgaatgaagatcagcgtcctgatgtccgaccttgcatctgctgtcggtctggatcgcgacacctacgtctacaccgatgaggagttcgcacagatgcagcagcaacaggcccaacagcaacaacagcagatggccgtacaggccgctgtccaacaggagacacgagcatgaccgatgaagtaaagaccaccgttacccccgcagtgacggaagtgccgaccccaacacccacgcccacgccgacccccgcacccgagaagaccgaaccggtcgataagggtactccgtattcggcgaacaccggctcccgtcagctggatgttgcgttgggtttcttcgtcaaccacctgggccttagcccggagtccccggaagttgtggaagcacagcgcaccggtaacttcgagtacctcaagggccatgcggcacagaagggcatcgcttccgaactcctcgatccttacattgcgctcgccgaaggtggccgcactgagctgaccaagggtgcggaggcgaagcaggcggaactcgcgaaggagctggacgagtatgccggtggtaccgagcagcgagtggcaaccttggctttcgtcaaggcaaactccaccgacgagcagttggcagagttcgatgaaatcctcaaccgtggtggtatcggtgcgcaggcgctgatgtatctgttcaagtccaagatgcaggccgatccctcggtcagcgtgcagggcaaggacgcggttgtccccaatgcaggcgcgcaggttccggcgcaggcgactcagtacgcgagcaaagaagactggcgtgctgcgcagcgtgctttgatcagcaagtatggcatcactggctatcagaccactccggaaggcaaggcacttgcggccgcgttccccggttaatcgttccaccaacaacaactagaaaggagctttatacatgagcaacatttggggtcccaccaatccggttaaccagaaccaggccctcggcgctggtccgctggatgcgttgcagcaggagcagttcaccggcgaagtggaacatgcctacatggcaaccaccgtgttcgagccgcacttcaagcgcaagatggtcgtcaagggtaccaacaccctgaccaagaaggccatcggccgctcgaccttgcagcgtctgggtcgtggtcaggcaccggacggcaagcaggttaagttctcgaaggcgcaggtgaccgtcgataccatgctgctgtcgcgccacaccttcgatgagctggaaaccatccagaccgacatcgacgcacgtgccgaagtctcgacgcaggcaggccgagacatcgcggacttctacgaccagaccatcgccatctcggcggtgaaggctgcgcgctacaccgcgaacccgtacggcctgggcgaagccgatggcttctacggcgctaccatccagaccctcgcagcgggcgacgagctggacccggccaagctgtaccacggcctgggccagatgctgatgaagatggaggagaagaacgtcaacccgcgcagcgagaaggtgctgttggctgttcgtccggcgcagtactacgcgctgctggacgcggagcagatcatcaacggcgagtacatcacctcgtccggcacgaagatcgacaacgctccgatgttcaaggcatggggcatcccggtcatctcgaccaacaacctgccgaagggcgtggtcaccggccacctgctgtccaacgaggacaacgacaacttctacgacggcgacttccgcaacgtcgtggctgtggctgtcggcccgaaggccctgatgatcggcgagtccaagccgctccagaccaagatctggtactcggatgagtccaaggtctgggtggtggatgcctggttctcgttcggcatcgcgccggatcgtgtcgagcatgcggctgtcttgcagaccgcgtaatccaactgggcgcagtgctaccataggctgcgcccgactcaattaggaggccacatggcaaccattgctgcaaagattcccttcgctcccggcacctacgtgcagctgtccgcagctgtcgatgtgtacccggacaagacgcaggcttacgtctgcttctaccagatcatcggcaccaccctgtacgtgcaggtgcgcgtgaacgatgattcccccgacctcggcacgttcgacctgttcattccggtgagcggcatcgaggccctgggcacgccgtaagaacacgccacgctctctaactgagggcggggcattattggtccaaggaggattcaatgtttatcagcaagctcgacgttgttaacgacgcgctgtcgtgcctcggcgaagcgggcctgactgacctacaggaagaccacgcttatcgcgatatgatcctcggcttcctgaaagctgagacggatcgcatctgcgcgcgcggctggtggttcaatcaggagtacacccgcctgctgcccgatgcgaactcgcgctacgtgtacgtccccgaggacgtgtactcggtggtgaccccggcgaccgggttccaagtaacgcagatgggtcgtcgtatgtacgactcgcgcaaccgcacctacgagtgggacaagccgattcctgttcgccttacgcgcatgttccccttcgaggacttgccgtacattgcgaccgaggcgatccgcgatgctaccaccgtgaagttccaaggccgcatcgactccgaccgcgagacgaaggccgacgccatgcgtactgcatcgctgtcgatggagcagctggtgcgccttgacgcacagaatcagaagcacaacatgctctaccggaatggtatggagcgcaatgcatggatcgcaacgaaccagcagtacccatcgggcgagcgagacatcctcggccctaacatcatcgttcactaggaggcatcatgagcaagaccgtaggcagcttgccatcgctggtgcagggcgtatcggagcaggaaccgcacaaccgtgcgccgggtcagatgtgggagagcgtcaacatgattgactccccgaccaagggcaaggctcgtcggcgaggcaccgtctactccgaccacatcgagctgccctcggccattaccgctgcactggttgaggcgcgctcgcagaccgagtacaccttcatcatcgacgggcgagaatacagcttgatctaccgcagccgcgcatcgacgctcggcaaggactacttcgcacagctgctggacaaggagtccgggcagttcttcgacatcgtatacgagggttcgacgtggatcgacaacctaatctccggcggcgtgtctgccattgcgtgcatcgggcggtatgtctacattgcgggcaacacgacattgccacgcgcaacgtctaccgaatcctggaactcgcccgacaatttgcagaagctcgcggcatgggttcgcgagggggcgtacagccggaagttcacgctggtgctgtaccacgtcaacggaaccaaggtcgagttcgcgtacacgacattggccgctgcgtaccctgagctgctggacacgacggacatcccgttctacaagccgggcagcaatccgcagacggcggacccggagtaccagaagcgagtcaacgaccgagtgaatgcgtacgagggcgagaagaccgcctggattcgcaaggcggcagaggacattgtgcccgcgaacatagcagccaagctcgctgagttggcggcgcaggcgggcatcatcgcttcctcgattggcccgtgcgttgtcgtggacgatccgaactacaacgacatccgcctgttggacgacgcgagcaacacgctggtctcctacgctgggcgcgaggtcagcgatccgcagttcgttacgctgtaccattgggcaggcaagatcgtgcgcgtgcgcccgtcaggtggtggcgacaaggagagctactacctcaaggccgtggcactcgaagagggcgctgttggctggaccaaggtggagtgggtggagactgccggtgtggtgcacgaaattcacaacgtcgtgtcccagatggtaatcgatcctgcgttgaagactgcgtatatcgcacagaacggcgagggcttgaagtccctggcaccacagctcggagaccacccggtctacaagccgaacgtggtaggcgatgcggtcacggctccgctgccgcactacttcggtcgagtgatcacctgcatgaccgtgttccaagatcgactcatgatcagcgcggacaacatcgtgaacttctcgcggtcgtcggactacctgaacttcttccgtgttaccatcttgaacatccaagacaacgaccccatcgagattttcgctcacgggtccgagggtgacacgatcaagcgggcggtgatgttcgagcgggacctcgtgctgttcggcgagctgcggcagtacgcgatcaacgggcgcgagttcctgtcgccgacgaacccgaacatcaacgtgatcgggaacttcgagggcggcgtgcgcgcgcagcctatcgcctcggggaacttcctgttcttcggcaagcatgcgaacgagcggacgggcctgcaccagatgcagccgggcgagacggcacagacgaccatcgtgtacgacgtgtcccaggttctcgacacgtggctgacgggcgagcctgtgcagcttctgggcaccaccatgccgaacatgatcacgtaccgcacggatgcggacccgtcgatttggtacacgtaccggtacgcagacgagcaaggcactggccgcgttatggcaagttggggaaagcagcagtatgctcccgagcttggcaccgttgcggctatcacgcactaccgtggcgacctgttcgtaatcacgctgcgctcggcaggaggcaaggactactggttcgccgacaagctgagtctcaacgtggacatgccgcgctatccgcatctggactcccaggtacggtacggtcaggagaccccgtggcacacggcagcagccagtaagctgtacgttgctgctgacaagtcctcggactacttcctgttgggcgcgccacgcgccggtgccgctgagtttgtggagcaggcgccgggtgtggagtccgcacttgtcgttggctccatcagccctgcgtacttccagccgacgaacccgtacatgcgggacagccagggcttgccgatcctcaacggtcggatcaccctgacatcgttcggcttccacctcgccgacactggcgggctgcgggcatacgtgttgaagccggatcgcgagcggaccttgctgttcgagggccgtgtgatcggacacagcagcaacatcatcgggcgacagccggtcttctccggcatccgcaccgtaagcgtaggccgcgagacgcggacctgcatcattgaactgcggtcggaagactggcaaccgcttcgcgtcactggcgctgagtggtccggccaggtattcatgccgcgcgcacgagggctatactgatgagcggtagtatcggtactatgctgcaagcgaacaacatcacccgcgtggcacgtgcgaagtaccaatccgccgttgccacgcaggccgcgaacaacaagttgaagaaggcacaaggggacctggctaactggtcacggtccctgagcaatcgtcggcgaattgaagcagcggagcaggagttcaacagcggcgctgagcagatcagcaacgagacacgtcaggctgggaagcagacgacgagcaacagcttgcaggcagcggagcagcggggcgcactactggcccgtgctgcgatgaccggtgtaggtggctccaccgtggaagcgatggagaacctcatcggactacaggctgcgacgactcaggaagagttggatcaggcagtggacaacatgcagtacagcggtaagcgcaatctcactactgccatgatgaacagctacatgatgcaggacttctcgcagacgatgatggacttcgacttcactcaacacatcgagccgaaggcaatgaagggtcgtgtcgcgaagctcatcggtgtggctgtggctacctacttcggtggtccgatggcaggcgaggcagctgctgacttcgctgtcggcgaatggcaggcggagaacggggacttccaaggtgcaaaccagtccttcggttcgtccatgaccaacgcgggtgcagcgtggaagcagtacagcgaccgcgatggaggctcgtggggcggagacgtgatccgtggcatgcgtgcaactggcaccagcactgacgctgcccgcacgacgggcggtgtatcaacgaagaaggcgcagtccgcatccagcggcagcaagtcttggttcaaataacaggaggcaacaatggcaggtattcagtttaaccccgtcggtggtctgcaaggcggggccagtggtggaggtgctgcggtgcctacccttggcatctctggcggcggcggggcgagcagcaacacgccaatgcgcagcggcaaggattggttcgacaacggcatgcgtgcggacttcggcggtaacatgccggagttcctcaacgacgtgttcgctgcgccgctcgctgtggcaaagcaggagcgcgagtggcagggctacatggatgcagctgcgggtacaaccgcagaagagattcgcgagacgaagccgtggtacaccaagctgttcgggccgactcagtacgagtccggcgcgattgcattcgagaatcagaagaaggcttcggatctgatccgcgactggaccctgcgtatgccggagctgcgcaagctgcccgccgagcaggtatccacgcagctgcgcgagcagatgaacagcatgatgtcggactccccgttcgccaatgctgtcttgcagaagagtctactgactcagttcgcaccactgctagagcagcatggtaaggagcgcatcgcttggcaacaggcggggctgctcaagatgcagacggagaacttccagtccaactcgtccacgtaccagctgctgatgtcgaaggctgcgtcgctcggtactgactctcctatggacatcaacaccgccaagcagttggaggcgtccaagtccgccctgttcgatgcgctgaccaccggcaggttgcagaacgacgatagcgtcaagtccttcatcatgacgggcctgcgctccgcaatgcgcaacggcgagttctacacggtcgaggcaatgatggatgagggcgtgctgtcctcgctgccaatcgaaactgctgagcagatcgagaaggcttacatcacggccaagtcgcagtacaagaaccgcttcactgcggacaacccggacttcgagaagatgatggcgaaggccaccgcgtcccgccacctgggcatcggcggcgagcctatgcttgcgcagctgcgggaaatcaacagcacgtactccgcgctgactggtgactccagcgggttctacgactccgagcagatggctgcgtacgccggtgatgcaacgtcgtcgtggctgcgtcggttcgagcggcaggaggataagcgggaacggcagcaggacaagcaggatcgactcaacgagaaggcagcagacgaggcggcgaaggctgaggtcgaggcgcgcaacacggcgcagctgcaagagttcttcgtcagcggctcccttggcgaggccatcaacatgaagaacgtggagaagggcgatgcagatcgtgcctcgaccgcgcgcttctctctgctgatgggcgagaacaaggtggaccaggcgatgggcaacctcgtgtacaacttcaacaacacgaagggcacgtacaagaacgatcagctctcggcgcagttgcaggccaacttgcagaacagcatggacgagcaggtgagtgatgcgttcctcgcacagcacgcgcagtggaaagcgctgtacagctcaccaggatacgccctgcagaatggtgaggtgcagctgacggacgcggcgcagggccaggccactgccatcggctactacggcgagactctcaatcgcaagatgaaggagttcgatgagaagtacagcaccggcagcatgactgctgaccgcgcttacgctacgaccttcgggccgtgggtggcagcgggtcgtccggacttccgtggtatcgaacgcagcgagcagaaggaagcgaccaaggcattcctcggagcaatccgtgggcagtccgcaggtatgttctcccgcatgttcggcaatgggttcgctttgcatccgtccgcccaggcgcagttggcacaggcggtcggtccgtactacgagcagctcgatgccggtctgttgccggagcagcgcgccaaggctgcgatgaatctggcgaaggcgggcggccgtatcgagattgtggcggggcagttcctgcactggaatcggaatcagcagccgctgactaagtacctcaacgatcccgatggcgagcgtacctcggtgctgttcgacgcagttctcaacgagcggttgaagtccgtgggcacgaagactgagggcaactccgtcgtcatcaatcgcctggccgacgagaagggcgatcccgtgtacgctgtgcacgtggagacggacgacgggttctacaacgtggacatccgaggctccgacctgagtaactacgatgaggccaaggcacgcgcactgcgagccaagatggaggcaccgaagaagccactgaacatcggcttccagctgcccgcagagaccgacaagcagttcgagcagtaccacggtatgagccgtgagcagtttgacgcacgcggaaagcgtaaccgtcagcgcatcggcgcggccctcacgggtggcgcagcaggtttgaccactgacgcactgaacaacaactaacaggagaacttatgaacactctcgaccttgcaggtctaacgctggaccagaagtttgaagcagcgggcaagttcgcgggtgttccctcgcagctgttcgcaggtatgtggtcggtggaatcggccaagggcaccaacatgacctcgcgcgcaggtgcgcggggtcacttccagaccatgcccgatacacagaacgcgtgggaagaacgcactggaaagaagttcgacccggacaatttcgatgacagcttgagcatggccgcgatgacgatgcgcgagaacatgggcaagttcaagaccatcccggatgcgctgcgtgcgtacaacgcgggctgggatcgctccaagtggggcaacgaagagacgagtgcgtacgtagggaagattgccaccgagggcggtatggccctggccggtgcaatgaccatgacgtacaacaaggtcaacccgaacggcagtatggacaccgcattcaatggcggcgagttcgatgaggcgctgttcgagaaggcttgggccggtgaggcgctgggcgacatgtcagtcctcaaggcttcggcaatcaagaagcatctgacggacgtggagaagggcaccgcgaacctcgcagctgtgcagacggcagcgatcaacgtgggcgacgccaatgtggtgcagatggcgcacgaggcgcaggccaccgtggagaaagacgctgcgcagaacgtggcagcgtacactgcgaccactggcaagcacaccacggacaccagcacgtccacgatcagcgccaaggaagtgcgtgcgcgtatggatgcggcgcttgagcgcgagcagtacgcacaatcgctgactgtcaacgacaagtggggcgctagcttcggcacaagcctgatggcgggcatgatgcgctatttcgacaacgatgtgggcgactcgtacccgaagggctggtcttacatggacagcgcgtacgagcaagagaagggatactcgatgaaggagcgtgagttcctgcgcgaggccgttaacccgcaggatgtcgagcgtatcaagggtgagatcgaacagcagcgctacgacgccaagctgcttgggcacctgtcggagtcctcgcggtttggttggtccatcgctgccgggttctcggaccctgtgggctgggctgcgggcctgggcgttggtaaggccgcgcagatggcgaaggtcggtgctgcaacgtatgctgctgcgggtcgtccgctgtctgcaatcgccgctggtgcagctgagggcgctgtcggtaacctgatcacgggcgctgcgctcgatgcaatgggcgactaccgcacgatgggggactatatcagtgacgcaggcttcggcttggcgttcggcggtgtgctgtctgcaccgggagccgtgcgcgaggcgcgtatcgcaggcttgcagaagagcatgcacgcacaggcggctatcttggacgcagaactcgctgtgcgtgcgcagcaagctgccggtcccggcgcaactccggaccaactggcgcgtgcgatgcagacaatcgaggagcaggacgacaacgcatggcgtcaggccacgttgggcaacatccccgacgctgaccgcctgatggcgcgcgctgacgtgggcgatacgcccgatcctgctgtgagctacagccgattcagcgatgatggctcccgcaatgcgtacatccagcagcaggcgttcgatcagagcatcgcgggcgacgatatgcgggctatggttgcggagttcagcaagcgaagcgacgatgtggtggcacgctacccgatcgatgaggccaagctcaagacgttcctgtcctacgctgacttcgaggcaacctccaccatcctgctcaacagcaagtccaaccccgcaaaggcgctgggcatcctgattgctgagtctccggagggtgcagcgggtcgtcattcgaccgcatcggtgtcccgcacggcgcacttcgagcagtacatgggcaacatcaaccgcaatacggaccagctgttcgacatgtgggcacgtgagcagggctatggcacgattcgccagacgatggacagcgacatccgcgtgcgcttcaacaaggaagtgcagttggagatgaatcgtcgctggaacaagcagccggagggtgcaatccacccggcagtcaagcgtgcggcggacatctacgaccagggctacaagatcatgggtaaggatcagcgtcacgtcggagttatcggcgcggatgctatcgatctgaacaccaacggctacttccagcgttcgtggaacctgggaatgctgcgcggcatgggtgcatcacagcgcgcggcgttcgtcaacgctctggaagaccagttccgcaccgtcgcgggcttcaccgacagcaaggacttcaacgttcgcgccttggcggtgacctacctcgcacgccttgagcatcgcgcggtcggcatgctcgatgttccggccaatctctactccaacgacgccggtgcaatcgttcgcgatgccctgcactctctggggctgagcaaggatgaggtcgaggcgcagatgaagcgcttcacccgtggtggcgcggggcataccaagtcacggatcgacatggactacggcaagaagtacgacgatggtgcgggcaacagcttcacgctcgtggacttcctcgacaatgacatgaacgggctgtatcgtcggtacgcacagcgcactgccggtgatgttgcactagccaagtacggcatcatgggcgagaacgggatcaaggttgcacgtgagtccatgctgcgcacgggcgctacgcagaaagagctgaatgccttcgaccagctgatggcagagatgaccggtaagcaggtcggcaacggtgacccgctgatcgcacagaacgcccgctccctgacgaacctgtcacggatgggcggcgctgtgttcccgcagatgggtgcgtatcttgacgccgttgtgggtctgggtgcgactcgcgctctgcgtgcagcaggtgcaacgaaccagatgcgcaaggaagtgcaggccctggtgcgcggcgagaaggtgtcaaacccgatcctgtccggccttgaaggcattggtccggagttcggcacggcggactaccgcatcttcggcatcttcgacaccccggagatggcggacatcgctggtaaggagagcgtgggcgtagtcaccaaggctattcgtggtggcgcgaacctgcaacgtgttctctccgggcaccgctgggtcactgctgcgcagacgcgcggcttcgctgaccagattgtgcgcaaggctctgcgcttcatcaaggagggaggcgaggatgtggccctaaaggacatgggcattcagggtgagatggtttctaccttgcaggcgcggttgaagaagatcgccaagttcgatgacaagggtgagttgatgtcgtttgatccgcgcaagctggacgtagacgacatcgcgggtcggcgcgcagtgattgcgttccgggactccatcatgcgtggaacgaaccagatcatcaacaaggagttcccaggtgaagtgggcaagtgggcgcataacgggtggctcaagctgctgtttcagttccgcacgttctcgatggttgcgcagcagaagtcgttcaaccgcatcctgcacacgcagggcgctgcaaagctcaccggcctgctgctgggcggtatggcagtcgccgcaccgatccacatggcgcgtgctgcactgcgtgcttcgctgatgaaggaggaggaccgcaacgagttcctggaaaagcagctgcacccgatggccctgggccgtgccacgatgaactacctcgctgcgatgggcctgtgggccgacgtggtggaggctgggtcgggcctgggcaccggctgggctgatgcgttcgggttcgatatgccggagggcatgcgccccacgggcggtcggaccatgaaggacacggacctgatcggcgggcagttggccccctcgctgggcgtcatcaacgacatcgggcagggcgtgatgggcaagccggacaagctgtggaagtccgcacccttcgcctccctgccgtacatccagcccgttctcatgggcatcgacagcgccctggacgagggcgaataaccgagcaaagctgggccacggacggccctagttttggtacacgtacaacaggaggaaacatggcgaccatcaccgatcccaccttccgcttcgccaccaacgttttcgacgcggacggcacggacaaggtgtacgacattagcttcgcgcttggctacatcgacggtgaatccgttgttgctatgtcaggcgtcgaagatccaaccacgaagctgctgggcgatatgaaggcccacgttgttagcttcacagataccccgcccggcaatcgcatcaaggtcagccctgtgcctgccgctgggcgtaagctcatggtgttccggcagactgacataagcaagctgctggtgcggttccaagatggcaagctccagacggggcgcaatcttgacctgaactccacgcagctgatcatggcaatccaggaaatcctggacggcctgcgcaacaacaaccagatcgtggaacagcagatcggcactatcgttgacctcaaccggatcatcaccgacatttaccgtcaggtgctggaactcttggcgtccggcggtatcgtgtccgttacgcccaaggtctgggcgggcgtgtggtctgcggccgaggacaccctcggagacacggacttcgagattgtgggggcggacgtttcagactccggcttctacgacacgtacatcgagggcgtcggccttgagcctggcacggacttctccgttgcgctggatggcgtgcccaagatccgctttgctcgtggcgactggcccgaaggcacgcgatggttcaccatcctgcgtgggtatgcgaagccgtacaccggcccgcagcccgtcaccacccttgcgtacccgatcatccggagtcaggcatctgcctacttcttggacgttaaggacgcattctcggtggtgttgctcaacaaccaatccgcagtgactgccaccctcaagctcatccccgaggctcccggcaataagatcactacgggcaccttcatcaccctggtacagcgcggcggcgtggtgtcgcttgcgtctgatccgggcgtcaacctgatcctccctggcggcaccgtggcgcgcacccgcgcactcaacagtgctatctcactcacctgcttggacgctgacgcgaacgagtggctagtatccggggacctcgctaagcaggagtagtcaatgcactttcgtctattcgatcgaccgctgatctttgatggtccgctgtcgtcaatgtacatcgacgggcagtacgcggactacgaaccaggcagcgcatacgagggccgtgtacaaatccacggctccgtaggttacaccaaggttgagattcttgagagcaacatcccgccgggcgcgtacgtctacgtggacaacgtgttcaagcaggtagtcgtcaagtggccgcagtacacgctgccggtcgataccttcaccctgcttgagaacggcgacttctcccaaggagacaacggggcgtggagcaacaccggccccaacaacccgttctccatcaaagccgacgacaagggtaaccagtcccttgagttcaagtctggcttcaagggtgggcattactctgagggtccgttcgccccgatcaaggacatcaaccgccagatcactgcaaccggacgcatcgcgcagggcaaaagctcgaagcgcaacctgtggggcggtatcgttctggtcttccacgacaaggatcgaaaccaactgaactacttggaaagcaactgggtaaactccggtggcgactacaaggacgttacggtcacggctgcggccagtgatgtgcgggccaagtttgtgagcgtgcgcgtgcagttcgaccgacgcgggcagaatcaccccggctgggcggacgacatcaagtggaatcactcgtggaccaagggctacaactctgacgagcagctcatggtgcgcgttcgtgtgaccgacgctctgggcaacacagccgaacacacaggttacatcgaagagaagagcaactggtacttcggaaagctcaacggcctgtacgtttacgacagcctggacatctccggaacaccaatctcgtggcgtccattcggcgctccaatcatgcctcccgagaacttcggaattggcgcatcggttgtggcattcgccacccgcgcgttcgtttcaaagagcagctatgcactcgatcaggtaggcattgcagcaggcgttcaagcgttcaagttgaacaatgttgctcgtcgcgccgaagcgcttcctgaaagcatgtccatcgcaagccgtgtgcgctcgttctctagtaagacgcacgttgcgtatgatcgcgcacgtcccgaactcatcaacatcaccgcagcggtgaaaggattcgttacccgatgaagattaagctaggcgccaaggggcgctttaaggtgcaggtcctgcgcgccgatgggtctgtccgactggaccggccctggcaggacaacctgatcacgaactacggtatggagtacatgaccggaaagtatcgcgatactatgggcggaagcaacctcatggactactgccgtgtaggcactggcaccactccaccggccaacggtgacgtggccctggtgtctcaggtcgggtacatgcctgccaacggagcatacagcagcatcgctccggtctccacttcgtctactccgtacgcaggctaccgggcagtgtacacgttcagccgtggtgcggttgttggtaacctgaccgagcttggtctgtcgttcctgacgaccggcagcaacctgtgcacccgtgcattgttcctcgacaccaacggtcagccggtcaccattgtggttgccgcagatgagcagctcatcatcacctacgagatgcggctgtacatccccactgttgcgaccagctcgacggtcaccgatcccacaaccaatgtgcagtacacgattcgggcactcccggtcaacgctgttaactgggtgtggatcaactacctgctgggcggtcagctcggtgcgagcaacggatcaacgttgagcaacatcactacctacgcctactacggtagcgacgctgcaatccggcagtggcacaacacgccgctagggactgagacatacggcggcgccgactaccagaacgtgccggtaaatgacggcacgtactcacgcgatgccgtcatcaccatccgactcgaaaccttcaacggcatcgatgtcaaggtgctacgcttctcggagtcctcgccctcgtactttgcgccgctcaactggcaattggagttcagcccaacctggcgcaagacgaatgaccagaccatctcgcttactctccgcctggagattgcgcgccgatgatcccagaactgaccctagctaaggcgcgagccgggtgggcgcaggtaatgggcagtcggtcaaagcccctgatcaactacgcggtcgggggtccgacgcttggagacggtgcagaaatcgcaggcaccacatgggttgtggagtacgtggacccagaagtccgcgtctacaagcaagagtcgccggaggaatactccgtggctcttagcctgcccggcattaccttcgtcagcctggcctttgaccagagcatgcgatgggctgtcggcttcactcatgaggacaagggcaagctgctgtggtacgactccattgcagcaggctacactgtacttgaagtcgcaggggctgtaaagcccttcgtggctctcgacgtgcgggacctcgtgtacgtcggcgtgagcgacatcatcgtttcatacatgcgcggcaccagcatctacacccgagtgcagcgggagcggtttcagactgagcgcttgctcaaggctgatgccggaagctccctgtctcgcttcggcctatccgtggtaaatcgcctgcaatggcaggtcatgccctaaaggagcaagaatgaaacttcccgtcagcgtggaactcgcagctgcaaccccgttgacgggtctgtctctgtttgcatcgtggatgactgcgtactcttcggtcatcatcacgaccctcgccatcgtagccttcgctgcgcagatggtgtggcgctacatcgaacaccgcgcgatcatgcgcaagaactcaggaggaaccaatggctaagaatgccgcagcagaaggtgccctcggcaccctacacaacacactcgccacagtgttgaccgccgcaatcacggcggagggcggtgcacccgcagcgatcctcgcggtcgcggcgaagttcttgaaggacaacgacatcacttgcgctgccgacaaggacaacgcgatgggtgagctgaccgaagcaatggaagcggcgcgtgcgccggtgagcgaaagggacaagcaccaggcgcttgagggcgtgctggacttggcgcagtatcgcgccggtaatcggtgagtaccgacaactcttggcgcgctgagcagctcgcccacttgcagagggagtacgtctccttcgcggtgttccttcgcgacatcatgtggttcctcggcggctggactccgacgtggatgcagtacgacatggcgaactacttgcagcacgggccgtcggacctcatggtccaggcgcagcgcggcgaggccaagtccacgatcacggcaatcttcgctgtgtggtgcatcatgatgaatcccaagttccgtgtgctgatcgtatcggcaggcggcaagcaggcaaacgagattgcaaacctcgtgacgaagatcatcctgttttgggagccgttgaagtgcatccggcctgacaagtccgcaggcgaccgtacgtccgtcgaggcattcgacgtgcacttctcgctcaagggcgtggacaagtccccgtctgtggcgtgcatcggcatcaccggcaacctgcctggtaagcgagctgatcttctgatcgcagacgacatcgagtccccgaagaactccatgactgcgggcaaccgcgagatgctgctgactctgagccttgagttctcggctatcgcatctggtcagcccggcattccgccgcgcatcgtgtaccttggtacgccgcagacgagcgagtccatctacaacaccctaccgggtcgtgggttcgacgttcgcatttggcctgggcgcttcccaacgcagaaggagatggacaactacggcccgcacctcgcaccgcagatccgcaatgccatcgaggcagagccgagcttgcagtacggcggcggcatggcgggtgacatgggcaagcccaccgatccgaccatgttcgatgaggagacgttgcagaagaagtaccaggatcgtggggcatcgagcttccagctcaactacatgcttaacacgaagctcatggactcccttcgcttcccgttgaagaccgaagaccttatcgtcatgcctggtgcacccaccgggaaggtaccgcagatcgtgcaccgtggtattggtgtcgcgaatcagaaggtctaccagtcctctggtctggctttcacttgctcccagcccatgatcgcatctgacgtaaagatgatcgactatgagggagtgcacatgcaggttgaccctgcgggtggcggcgctaatggagacgagacgggcttcgcagtgacggcgtacgccaacagtaccatctacgtcctcgccatcggtggtatccctggtggttacggcgacgagcagatgacgatgcttgccaagatcgcggagacgttcggcgcaggaactatcagcattgagaagaactacggctacggcgcattcgccaaggtctggctccctatcctgcacaagacgtggaagggtacgatccttgagccttacgtgggcggtatgaaggagaagcgcatcatcggaaccatcgagcctatcatgggccgtggctctctggtcttcttcgagtccgcgatcaacatggaccacgacctcacggagttctacagcaacagcggcaaccgcaagatgtactcagtgttccaccagctcacgaagatgcaggccctcaagggctgcgtcaagcacgatgaccgggcggacgcactggaaggaagcatccgtttctggatggatcggctcaaggtcgatcagcacaagcgcaaagtccaagaagaggctcgcgagtaccagaagtggcttgatgatcctgtcggctggagccgcaaccagaagcccatgcgtgtagtattgaacgtgggcaacaagtatttcacataaggaggaagctatgcagcgtcatgaattctcgaattggatgtccacctggggtggcggcaatcaactggttaccgagttcgttcggctgaccgactacgtaaaggtgcacccgaagcacgcaacgcagatccttgcgctgttcgatgccgacgttgccaaggtccgtgcggacctgatcgcatcgggcgccgtgccgcctgtcactccggagggctaatgaacaagctgccttacatctccaaagcgtccgacctcggcatcgctctcacgttggccgctacaccggcggaagctcgcgccctcttgggtgttggcagcggcggaggtggaggcggcgctgtggattctgtcaacggacagaccggcgacgtcactctcgacgcagccgatgtcggcgctgcgcctgcgggcgctccgctgtcctcattcgcaaacgacgtgggattcatcaccgacgcagacattcccggatcgcccgtgctgagcgtcaacgggcagacgggtgcggtggcactgacagcgggcgacgtgggtgccgcaacgacggcacagggcgctaaggcggacagcgcattgcagcccggagacatcccggcacagtccgtcaccagcgtcaactccaagaccggggctgtcgtcctcagcgctgccgatgtgggtgctgttccaactactgccgtaggttctagcgtggctccgcttgttggcgggttgctaccgaactcctacctgccaccgcttgccatcacgagtaccttcgttgtgtcctcgcaggcagcgcagctcgcgttgactgtgcaggagggcgacgtgtgcatccgcacggacctgggcaagagctacatccgcctgaactcgtcccttggtacgatggccgactggcaggagctgctgactccgaccgcacccgtgcagtccgtcaatggcaagaccggcgtggtgtccctcaccgcagctgacattggcgtggtcggcttctacgttcctggcttcatcagtgggctgtctctggcgtgggtggacatccataccgtgagcgtgtctggtggcacggcgcacaaccaggccgctgacgccaactaccggcagaccgccgcagcgaacgtcacgatcccgagtactgcaagcacgttcttccacatctaccagtacgggaacaacctgcttgaggtttccaccgcagctcctaccacgccgtacgtcggcacggctgcgagcaagtccggggacacgtcgcgccggtatctcggctccgtggttacggacacatctggcaacgtggtcaagttctcccacgacggcgatgaggtgctgtataccgaaggcatcgcacgcagcttgtctggcggtgcagccaacgtgttcaccacagtgagcctgtcggcgctgatcccggccggtacccgcaccgcgctgctcgctatgaccaatggcagcactactgtgccgatgcgcgtgcgtcccgtgggctatgcaaacagcttgaacagccgcatgtacggcatcacaggctcaggcttcgcggctggtcccatcactctggtgggcgggctgaacgtggagtaccaggtggacgccaacggctccgcacacatcgacgtattgggctacaagctctcgcgttaaccataaggaggaacaatgaagagtagaatcgtcgctgtagtgggtgcatccctcctgagcgtcgcaggcttgttccatatccagaccagtgaaggggtgcgctacacggcgtaccctgatccggctactggtggggcaccctggaccatctgttggggccacaccggccccgaagtccacaagggtctgactgtaagcaagaagcaatgcgagctgtggctcaacgtggacctgcgcgagcatgagggctacgtccgcaacctcgtgaaggtgcccgtcaagcagggcgagtacgatgcgctagtgtctttctcgtacaacgtgggtccgacgaaccttgcgaacagcactttgctgcgtaagctcaacgccggggaccgcatcggtagctgcaaggagtactccaagtggatctatgccgataagcgggtcttccagggcctcgttacccgtcgatacaacgaacaggccatgtgcctcaagctaggagactacatctatgatccgcggattcgctgattacatcattggcgccctacttatcgtcggcatcttgctaagcgggtactccatgtacctctcgcagcggttggcacacgagaaagaggtcgcccaggactccaaggctgaggctgcggggtataaagtctacgccactgagcataagaaggtggccgaacagaaggaaaagactcatgttgaagttgaagaagcgttgcaacgacacgtggagtgggctgatgttcctgttcctgatgagcttgctgacaagctgcgggatcggaatccctaaggagttcctcaagccttgccacaagaccatgttggccgacgggcctgcgaagaaccgcgatgtgttcaacgtggctgtggatagggggttcgacatcgacgcatgtaacgcggacaaggctgcattgcgagcttacatcgaatcccaccctggtctccggactaaaaattgatagtctcgtgcgcgggggtacctcagatcgcaggctcccgcgcgccc

SEQ ID NO: 42 - protein, 568 aa, unidentified
  REGION 1..568: note = the amino acid sequence of tail fiber of a bacteriophage
MADITPKAFDGMTLSLVAVPLKGNPGEQGKGLRGDPGDSNYQLWLKAGNTGSLEDFLLAMKGEKGADGQGLTNRGDWEVGLYQPGDYVFSAGTQTAISMWIYRGSEEFISLVPPDEDTDNWIEFAADTGKPIELRNNGEKIQWRIQDAAEWIDLIFVSDLRGPTGLKGDKGDKGDAGTGLNNRGNWAAGTYQPGDYVFAAGTVAASSMWILSSTTDYVSNTAPANDLTHWIEFAAPAGPAGEQGDDGLSVNLRKTSTAIQYQQTGGPWTDLVPLSDIKGDKGEQGIQGVKGDTGVTGKSAYQSALDGGFVGTEIQWNASLKGTKGDTGTAGKSAYQSAVDSGFSGTEAQWTASLKGAKGDTGTQGIQGIQGVKGDKGDKGDTGPAASYTEGTYAARPAPGIAGSTYYATDIRETYRSNGTNWVLASTGGVVLASVAVEASGLSNANEIPITSHDFGLTPFALVPNAPSLIFTCGQRPFIVTLSGTMRGGEANATWCVQLEINGTVYTQLLDKDSIADNWKAVVRSTKPLTFAVGTTITCRIRGVVGGSTNGALFTNPADPLQIVAMSV

SEQ ID NO: 43 - DNA, 1707 bp, unidentified
  misc_feature 1..1707: note = the nucleotide sequence encoding amino acid sequence of tailfiber of a bacteriophage
  source 1..1707: mol_type = unassigned DNA
atggctgacatcactcccaaggcgttcgacggtatgacgttgagccttgtcgctgtacctctgaagggtaatccaggcgagcagggtaaaggtctgcgtggtgatcctggcgatagcaattatcagctctggctgaaggctggcaataccggaagtctggaagacttcctgcttgccatgaaaggcgagaagggtgcagacggccaaggactgaccaatcgtggagattgggaagttggtctgtatcagccgggcgattacgtcttttctgctggtactcaaacggcgatctctatgtggatctaccgtggaagcgaagagttcatctcactggttccgccagatgaagacactgacaactggattgaatttgctgctgataccggcaagccaatcgagttgcgcaacaatggcgagaagatccaatggcgcatccaagatgcagctgagtggatcgatttgatttttgtatccgatctccgtggacctactggcctcaaaggagataagggtgacaaaggcgatgcaggtactggcttgaacaatcgtggtaactgggctgctggtacttaccagccgggcgactacgtattcgcagcgggtactgttgctgcaagctcaatgtggattctcagctctacgactgattacgtatccaacactgctcctgcaaatgatctgactcattggatcgagtttgctgctcctgccggaccggctggtgagcaaggtgatgatggactctcagtcaatctacgtaagacttccactgcaatccagtatcagcaaactggtggtccctggactgaccttgttccgctgagtgacatcaagggtgataagggcgaacaaggcattcaaggtgtaaagggagacactggtgtaactggtaagtctgcctatcaatctgcattggatggtggattcgttggaaccgaaattcaatggaatgcatccctgaaaggaaccaagggggatactggaacagccggcaagtctgcctaccagagtgctgtcgatagtggtttctctggtactgaagcacagtggactgcttcgcttaaaggagccaagggtgacaccggtactcaaggtattcagggtatccaaggcgtcaagggtgacaaaggagacaagggtgatactggccctgctgccagttataccgagggtacttacgctgcacgtccagcccctggtattgcaggtagtacctactacgctacggacattcgtgagacctatcgttccaatggaaccaactgggtacttgccagcactggtggtgttgtactcgcatcggttgctgttgaagcaagcggtctgtcaaatgctaatgagattccaatcaccagtcatgactttggcttgactccatttgcattggttccgaatgctccatcgctcatcttcacttgtgggcagcgtccatttattgtgacgctctcaggtacgatgcgtggtggtgaagccaatgcaacgtggtgcgtacagttggaaatcaacggtactgtctacacgcagcttctcgataaagacagcattgcagacaattggaaagcagtcgttcgttcgaccaaaccactgacgtttgctgtcggtactacgatcacctgtcgtattcgaggtgttgtgggcggaagcaccaatggtgctctgttcaccaacccagctgacccacttcagattgtggcgatgtccgtatga

SEQ ID NO: 44 - DNA, 76340 bp, unidentified
  misc_feature 1..76340: note = the genomic sequence of a bacteriophage
  source 1..76340: mol_type = unassigned DNA
gtcagacgttgaggtagagcttcatgctgctctcgataaatctggtccatatcagttttccatcaggctacggtcgttacgaatctgcttactcagggcttcgatttgtcggtcacggagtccaagagttgaccggtactcacgttccaagcttcgcccttgttcaagagctgcgtcgagtcggcctgcatggcttgcgagacttcgacactcaatggttccagcttcggcctgacgttcgtatattgccgtgcgttgggtgttgagctgcatgcgcttagcaagatcagactgcaaggaagcaagttcaacagcatgcttttggttcgcttgtgaaagctcataagtgatcctttggttctctgcacgatgcacttgttctttctgtgcatagctatctttgagttgttgaatctgcgcaagatacttggctgtgtcttgatcccattgcagttgaacagaagcggctccctcacggaagccgctttgtttgattgaacgatagccccaaaaactcagggctaccaatgcaatgagaaccaagatgtgaggcaagtacttaatgagggtcttttgccacatcgaaggtatctccgaaatcagtacacttggtcaatggtacgttgccaatccggtgatcgacccatccgacagtgaatgtcttgaggttcgtcaggctgacgtagtgttgtgcttgataactgtccagcaacttgatcgtcaactcacatgccttgaccttgccacgtacacgttcaagactctgatatgcccgaatcgaagctggtcctaccttaccatccacggtaagttgagggtagtcttttccgtctcggttgagagcattgagactggactgaaaccacttggagccgcgagacggtccagcattcacaccgatgtcagtcagcttccaagcgacagcaggactgatctcaatcaagggtgcatagcccggcttgacgatgtagtcgttgtagtagatcgagttggcagcttcaacagacagatctcgcatatgaccggtataaccattggcacgagcaacctgctctgtcacaccgtgattcgttgcaccacctggatcagcagggttgttgacataaccgccttcgacagcaaccactgcaccaatgatcaacgcagcgatacctgcgataccagttttctttccattactcagcttctgattctgagccatctgacgttcctttgaactgtaggacacgggcaatcatcgccaagccgagaagaacgatggtgatgctttttccgtgtggaattttattgagtgaacccaggggaatattggagacaacgaagtctgcaatgttcagtagaaaggctccgcccatgtaccagatacttccaaacttccaactcttacgccagtttggaatcagcttgatcatgggccaccgccagccaaccatgcagcaatcttttcacgaccagtcagcaaagcagtgaccagtgctgtagcaacaacccatacccatttaccaaactgtcctgcacctacgaccttatgcttgatcgtaatgaagtcatcgataacaggcttctgcgtggtgaggctagtctccacattctgcattcgttgactcattgcaatgagctgctcgttctgagctttgagttgctgaagaatgtccttatttgattcagcgtgggtcttgagacgctcatccatgcgagccaagagaacatcagtagattcagccattgcccctgtacctttgaagtgttgcccgcagtttagggcaatataaaggccgggggaactacaagttcacccggcccagtagacagcatcgtctatctcaagtgcgcctcagattccactgaagcctgttgacggagttcagtccaacagtcagcagctcaccagggagattcgacgctagaacgtattctacgccatagcgttcacgctgcaccctgaccaccaaatctgtacctttcttgtaggaaaggatgatatcagcttggccggaaaacagggaacgtttttcgtcgagacagagcctggggctggtagcccctggaatctccatcgtgcgcatcccgttctgcaaggtgtcatagtagaagaacttgcacacgcccccaaccatgtaggcaatgtgcggctgcatcgcttgatcgaatgccagagcaatctgggtgatacccggttcagacaagatcgttacaggcaagactccctcacggaaaacctcgactcgtccttcaatgtactgggcagtccagagtgctgctgtcaggttcgcagtggcttgtccaaggacaagaccaccacgttcgtaatcaatcaatggctgtgctgagcggttctgttgttcgacatacgaaccacggagcaccttctcagaggctcggggaatcatccggtgtagcgcccccacgccatgcgaagagtcagattgacgatctcatcagaagtcttgggaacgccaggagtaatgccaatctgatagttgatcgcagcactaagagcacggaaaccagtgatcgttgcattgtttgcatcattgattccaagtcgcgcaagttgatctcgatacttactattcggagtgtaggccaaagtggccaactgataatttgtaaaagttgactcattaccatcaggcttgcctgtagctggaccagcaccagtaccccccaagtaccaaaagccagcccaaggatatccactgaacaaaatagtgccgctgcccccaccagcttcgctggtacccaacatcgtaggacgaatagtaaaagtctgctgtacacctttgatcgtctgagtctttacaacatcagccatatgggcatagcaacgaatctcatacgtcacgatgaggatgtcaccggtcaacaacgtgacagtcgttggatttccttgtgcatctttaatcaatgcgtgcgtgaacaacttgcgtccattgatctggttattgaacagaccaacttcagcaagattgacttcagctgccgcaggattgaactgaaattcctttcgataccatgcgtagaacggggcacttgtagtaataccagcagccgtatttgctccattggcagtctctgcattgaaagcaccaaacgttacatcagtgaatgcaggaggcacagcagaagtaccaacaccaattgcactcaaccaacttgagaggtattgaagatcgataccttcttgctgactaccaccgaccatttccagagcatagtcggtaatcagattgtcttgccacggaatcacttcctcacgaatgccagtagcagcacggatgatttcacccttgaagacaccagcgtaggagtgctggatttcaatgacttcgtttttgttctgttgctgcttcattacccataactccaagtgacagatggggtgttttcaagagaatcaatcggcatgttgagacggggaagtttcttaatttcgaagttggtgagtgatggtgtatgttcgaaagcttcaccagaagacgtactcttcctaaccgtagtcacttccatggagacaagtgagggagagtgagtaaattcttccaaacttggttcaagctttttacgaacactattgatttcaaaaattacttctggattttgttgaaatgcttctagctctcgcaatgttccaagcgtacgcaacgatgcaactgtcgggttgttagtaaagtcatcccattggtagaacggatacaactgactggtaacagagacaccatcttcagaaatgataccttgccacacagcagtacgaccagtggaatcagttacttccaagatcagatcaagatcaccttcaggtggtagctcattgatatctggatacaccagatggtcccagctgaagttgtccaaccacacattcttgttttcacggttacgaataccgaatgcaccaatagcaacatcgtgtgcattctcaggcggaacagcagtgacctttgaagggaacaccttgttcttgctagctgacatcacagcattgccctggctcacgtccagctcattgccatcaatgtcataccactgaaggatcacggcagcaccagcattgccttcagcactcgcaccttggcgtacatcacacattgctgtgatggctttgccttgcttcactcgaaaccgactggtggagacaagctttgagataccacgctcagtagcaaagcgaccactataagaaccagtcaatgcgttctcagttgaccgatcccacccaagtccgtactcccaaaatcgagcgctctcttcgaatccagcattacgaatgacagcaggaggcgtctgatattcatcagcacgacgaacccttttccaactgatgacaacttcttgagtgtcctcatcgatagtgaagcgtgtggtacttggcagcacactgccaccaatctgacgtgccttcgatggaccgatggcattgatcagttgcagtcgcccttcgtaatcctgattcgaatcgtagtcaggcagaagacctaccacatagagtggtaggtacgacttgaccttctggacaccaacaggacgttgataaatccaagtcgtcattcaacgagcctctggccgagcaggtagacacgcaaggcacgcccagtgccattgcctacctgagtgacactgagagagatgacgtctcccttgttaagcacatcgcctcctgcggcatatgacaccggagtcgttgcactggttgaagtcatctcgttgttgtcgatggtgagcttgttcgtcaggatcgatgcaccgttacgcaagatgtccatcgtcaagatggtgccatctgtttgtggctcagagagcgaaccagtaaggccagcattgaccaccgagtccagcttcatgctgtatggcagcgtgtagctatccttcttcgttcccacagtgatgccggcagtactggcaacagaacgatcgatcagctcaatctgcatcacgtcagaagaagcaacttcacggaacatgtcaccactgatcacccactgattgccatcagcattgaagcaggtagccgagataacgcaatcctgcccacgagtggtaggactgaattcctgtgctggatacagagtgccatcagctggattctccatagccaacgtcactgcaccagtaccacgctgaaggacactgaagaactcaccgttcttccaatcctttgtgtcatcacctgtcttgttgcgaatgagcaacgtcagaggaacattcgagttgacgaccagcaagctgttttctttggtgcgatcaatgacagtgttgttgttgatgatcgtcgtatcaacttcaggtgccacagtctcgataggagtcggagtctgatacggcttggcatagccacgcagaatcgtgtatccagctgcattgtcattgagtggaaccaagaagcgaatcataggagatgcaccattgatcggtggatcaatagtgaagtcaacaggattcacacccacgtagtctttctcaccgggagtgttttccacatacgtatcgaacagcaacttctcgtatgcatcggcaccatcgataggaaagccagtggtttcaccatcaccaaggaatgcccagtaacgaggcagcacactgccgtctcctggcgtaccttcaccaccaccagggtcagtaccttcgacgtagccgtagcccatcaacgacgtgtactcagtcccctgagcaccattcgtgttgacgtacaagccaccagttgagatgccttcattccgtggacggaagacaacttcaatcaaaaactgctgaccggggttgagatacggtggtgcatcactggttgcagtaaacgaaccagaggcaacgatctcaccgatacgcacaggactcttaccaacgttggtcacaacgatagtacgaggcactgacgaacgagacaggatcacgttgccaaacaccactttggcaggagccacagacacctgatacggatatgggaatcccaactccgagcagatgatgcggcttgaatgatcaggcaactgggacatggatgacctcaacggcagtcagaaaccacacgatgtctgccgtctgcaaagatgctggtgcattactgttcaacgtaatgacaacaccttgtgcttggtagctcacagtgaagtaaccagattcgctattgcaacgattaccagtgattggatctttcaaccagatggttgaatccatcacaccatcgagcagaaccaagggaggaaatagcagcgaagtagtcgtaccgaccattttccctagcagggtcatacgacgccaaggatcagctgcaaccttttcgatgaatggcatacgagacgcaacgaagcgaatgatctcgtaagccttcggaccaagcagacgatctaccaacggattcaatccaccatatggatcaagatgattacgcattagacgaagcctcctttttgaaagcgagtgttggtggtggaagttgaaatgctgacagcatcagacatcaatgcttcatcgcacagctgggtgaacattgtcaaatgttcctgagcttttgctgaggattcagcagtggccatgttcgtgtacttcttgtaagcgatgtaagacaccaacgcttcagtcagcacttcaggaagcatgatctcttgctcaagttcaccatccaacttcggatgctttgcttgataagtgatcgacaagatctgcccaggaattggacgtgatacttgaaggacatttccttgtggggtgaacagcgagtttggattcccatcatcattcaatgggtacgaatatccaaagctgttgtagacctgcaagattcgaatgacatcatcagtgaaacgttcttctggaagatccagaatgtaacgccaacgttccgtactgctgctgtcgtgcggagagaacttactgcgaagatggtagttggtcgtcagctcattcatcacgaccatgacatctttctcgatcagattgaatcgagtgtagatgcgaagcaatgcatcattcgcatggctgataacttgaggttgattctgctgatcgatatagcccgcaccgcttactcctgagaagagtgccgagtacggaccatacgatagcttctcgaatagatcttcgacgttcatcgaggtcacacgatataggagttgatggcaagtccctgatcaggtacttggtcgtgttcccaccgatccacttcttcaggggttgccggtgcggtttcagaggggagccaaggcttaaagtaaccaagctgactgatcgtatcaagacagtcgtccttgcccttaatgccagactgagtgaccagtcggatctgccccatgaacatgcccatgataacactccccttcatctcttcagggaaatacatcttgcctgccttgaaccaaggcaccacgagattgaagcggaccagcttgtcagtgcttgggcgaataccaggatcgttcgacttgctgttgctggcgaagttgaaccagatcttccggaccaacatctcacgctgaagccaagtgatgaaggcattctgctgaccgctgacttcgacgcctacctgctgagggctgtacttctgtacgaagtagaacagcttgtcgatggattcatccatcgtcgttcgcttagcaaagccatctacccagaaccaatccccattggaattgattgcccaaaccgagatgacactgtagtcagctgtcgtcttcttacttgttgcaaagtcagtggtgatgtagaagttgaaacttcccatcccctccatcaacttagcacgcgagtaccagcggatctcagcatcctgcaccaagcgttcttcttcagacgtaacctgaagcatcagctcttgcatgaatcctgcgaccttacctgtaccaatggatagatcgtattgacccttgatgaagtcaaaggtaaagcgatcatcccatgcaccacgaaactcttcccgtgtacaaggaaagcgttcgcatactggatacacgttgacatcccactccccagactcgactgcttcaacgatcacatcttctttgttgaatggcgtaccgttgaatacgatcttgcgacgagtaggatcaagcgcatggttcacaccgttatagacagtgttcttgattgcatccattgcagctttggagttggcatcaccatcaccaatcaagtcgtcaaggatgcaaagcgtaggacgtttaccaaagatctttgaaccacggataccagtctgtgcaccgaacatcttgatgccaagcttgtgtccatcaacagactcaaactccagatacgggtcagtgaaggtagccttcttgatccaacgctgaaggaatggactgttgttgtaacggaactcgatgttcttacgagcgttcttgacgccgttctccatggagtccgacacatagatcattgcttcaaccttgccatgcccaggcaagtaaccgaacactgcgagatacagtgtcatgtactccatgaacactgtggtctttgcagcaccgcgaaagagaaggttgaccagatagtcactggtgctttgtgccagcttatcgagcatagccaaatgcacagggggagtcttgttagactccccttgctcaccgttcactagcttgatgaagttcatgaactccatcgcaaaggtagttggaatgtagtccgtactattcaagaacgaatagtcaacatcatccaaccactcttcgagtgactgtttaatcttggccatgttcaatcactcgaccaagcttctgctcagcgatctgacggatcggtacaccttgtgcaacttgagagatctgagcttcagccagttctcgcaatgcacccttgagagattccatacctgtatccgtgacattgatgttcaccaatggtgccatgtctttcggcttctcggtatgggcaagcactgagttggctgcggtggttcgcaccatctcactctgagcgttctgcatcagatcaacctgcacgttcaatgccctctgtcgtgcttcctgattgatcagccagaacgggatcatggcttgctcaaggatagcttgtaccaacttacccttgtggtacatggccacataagcagaaatggtcttggcatccagcccacgtgcgagctgatccgcattacgttgtgggaacgtccgagcgtaggactctccgttgctcagacccatcatcttgtaggtgcagtaggcgactgcgttgagatagtcctcagtcttgaacttcccttcttgcaacaccttcgtataggtaatgaagttctcacgcacaacagcagcgatctcaggatcagtcacgatcccgttgatcttgtcagtgaactcttgggtcgccagacttcgcataccagcgggcagtgcttggctcacctgtgtaacagtcagtagatcgttgctcatcttattctcggtttgcttctattacagagatcttgccagcttccagaatacctaacgcatgaatgccattgaagtcttcgccatatccacggtacagatgacccccatcgcgcagttcaactacaactacaacatgcttcgcatcgaagtgaccagactcaatagagtcagccagattacgtaatgcctgtggtgcgttagcaccaaaggctttcttcctaatcggtgtcaccttgtccatgacttactctccctcaccagccagctcaagacgcttatccaagatagcgaggtaggacttcatcacactggcttgagcattcagcaacatctgcccatcagtccccagctgcttgaacacaggcgtctgtaggaatgctgacagcttgtggaatcgaccagccaactcattcctttcatgggtcagacgggtcaggaaattaccttgttccaacttaagcttgtctgccagacgccatccgaggaactgccagcagttgttgatggctcgctcctttgcatacttctcacccttttcctggtcgtagttctcgatgctcacgcaagccgaggaaccctcgatggtgaagtcattgtccatcgtcagttgacagatggtcgtcttgccgtcaggcagtagggtgtacgactccttcttaatagaggcgtggatttcttcgatggtcactttcggtgcgttgctcatacttatctctatcctatttaggttggggtgtaagtcttttcgaagacgctcttcggagaccaagagatgtacccggtatgggctggatgattccagctgccaccgtcttcgtattcgacaaggtagcctggatcatcaggattctcgttgtcaggcagcgtccagttccgataggtgttgtagtcacctcgtgtcataggccatgccttgaggtacttcgtaccgacatgccgaacaccagcaccaaggtcaatcatgtctttctcctatttacacttgaacaaacaaagccacagatatcagcaggctgctgagaccgaaggaaccccacatcacagccttggctcgtagctcccagagcatcgccttgtggtgatcctgctccattacctgagccgttctgtaatcctgatgctccatcctcgtaccctcttgctttcgtgtgaggctagactatagactgtctatagatagctgacaagactatccccaataccgagaaggatgggggtacgggcctcctatgattagtccttatgcttcgcataagtgactaaaaataaaggggaaaaagaactacacaactggaaccaagggagctatagtccacccacaccaagggtgctgctgtcgtcttggttggcgttgagctgtcgatgtgggttgccgtgtcgcggactttctctaccctactggtgtgtggggatataactaccagagctgttgtcttgttgcgtacctccgaccacagacgaccgtggatctaacgggaagctagccgctccctagtagcaagggcttcagtagctgccgatcagctagagtcactatgacaatcgaggccacctgttagcgcaggtggcttttttattgcctactcttctacctcaaacttatctcgcatatagagaactctcccactattatttttaggagagagttactccaacttatgttcagtagtaggaaccttctgcaatattttttattgacagtccattgcacttttatgtccacacacttccacacacacaaactacccccccggtatgttcacactcgtggtctgcacccaccccatgtcttacacactgatgctccgcatcctatggatctattgatctctgctactcatcttctttctttggttcagcactcacgctgttccttcatcactactacctatcggagatacaaatgaccgctcaagctaatactcgcgtcactctggctgccatcctcggcactgtcaccactgctacttccactgtcaccaataccttcgatgccctgaacaagggtatcggtatgctcaataccactgtcaacgatgctgcttaccgtcaggaaaagcgctccaagactgatcgtgctctctacgtcaagaacctcatccgggatacttcccaacaggaatctctggctaacgctcgcgtcaaagaattcctcaagtccaatcccgatgctgctgctcactatcaagctaccttcgacgaactcactgaactcctgaaggactaacaaaagcagatccacccttcggggtggatctttttgtactgatagaccattcagtagatagaccatcgtctatcgatagtcctatagagattggatgagtggagaagtgtcagagcactgacacttgttctacttccccaactcctacatcccatctctctagcattatcccctaaacattccctataccctggagcatctcaatgcgtaacatcgatggcaatatctggatcaacgaagttgaagatgactactacaaagtaggctactacttcaccgatgagaacgatgatttcattggtcctttcatctcagctgatgctgctcttaaagcagctattgcttatgttcttacccttggctaaacataaataggagagaactcatgttcggtagctttgagtgtcaccaatccaaacctttcgaccttcgtcgtgaacgtcgtcaaatgtaccgctatcacaagcggtaccgtcactccaaaaaggatctgtatgcctctggggtcatgcagtctgtccgtcaattcaacaaggtcatggctgctcagtacgaagcctatgaagctgaaaccggccaactctatgaatcatgagcctgctcgttcttacgatgtaggctgctacctctggggtggcaacttcagcctcactggcgctgaagctcgtgtcttacatgagcttctgcctcatctgaaccaaggaacgatggagtttgcttgcgtcaacatccaacgttctttcgactttgatatggagaataaccaatgctgaccgaccaagatctcaacttcgaacagaaaggctatgacgcctgggttgaactctgggcagaccagggctgtagccctcgtgctactgattgtcctgctcgttacatgcctgatggtcccaaccgtgatgcttacatcaagggttggaaccgtgctcgacgtgaaaacgaagagtaattcctcaacataaataggagatagatctcatgcctcgtttgcatcacagccagatcgaagatctcttggctgaagaccacacgtgtcctgattgcatgctggatagagctgactgcgtgtgcatgtctgatgcatacgatgatgtcttctgtttccctgactacgagcctgaagaaacttggctcgaacccgatcatcctgaattttactgaacctaactaggtgatagctcatgatcgacatcagcgtctccatgcccaagaagtgcttcaactattccctgggccatgcccctttcgaagtcaacgtacacgtcagctatgacgtggttggctgtgtccgtggcaaagagggtctggtcgtcatcctgacgactgaccatcgtgtgctcactccgtggatctacctcaaggcttggtggttggtgtctatgcacctcatcaagtactaccggtgaagccgtcatcctttggctttacagagttgcttatcgtattgatattccttgggatatcagtcgcagcagctctgttcgcctactacctctggaccctgttcaatgtctaaccgtctcgaccgttcgttgggcgtcaagcctgtggactatcacccgatgtccaagaaggctgctccgcagcccaagggattcaccctcaaggtgaagaccgtgatcatggtcatgctcatcgcaatcactgctgctgccctgtaccagtcctcgcactgcgtgcaaggtgttcgctgcgctgattgatgttcaacttttaagtcaactttcaactaccttctagagttaaataggaggtaggtgtagaacagctcacccacagctgattgctttttgtgggtatcaacccgttaacaattcctttcaaactcaactcaataggtatcaacatgtccgctcagatctccgaattcgaacgcaccttcggcaagaacagtgcaaccaacgaagaaaccaagtccaacgtcaccacgtcgaacgaccgtcagctgaagcccaaggcacagctgtggatcaacgtgggctacgaagtggattcccacgacaaggatggcaacgccgtcatcgagttcatcagcctgccgaccggtatccccgtcgataccatggacaagctgccggccaaccagcgtgatgcctacttccagaagaagcagcaggcgtccaacaagttgctggataccgtcatcgccatgggcaagacgttgcaaccgggcgaagagaaggtcatcggtgcacgtggcagcttgcagatccaggtccgccgtgtgaaggctgaagccgagatcgtcaacgaaggcgagaacagcctgatcgtcgatctggtgctgtaatcgaatcacccatgggccttctaacgagggtccatggagctgtctattcaatgtcactgggtaccaactaacctacacttgagtagatagctccatgcaatgggcatgaaccaaggaattcaacaaatggctatgaccaaagtacccaagtcctactacgcagcagctgagaagctgcgcattgcaggactgttcaacgttggcaaacctgcctacggcagtagtggcaagcgcttgaagtaacacatgagaggactcttcggagtcctctttcttttttcaactcacctaaatcctaaaagtaggatttagaggtatcttggtagaaagatacctatggtcttactcttacacaattcaaggtgaataggatgaagaaatatactaagtctgaagtgaagttgcttaagcaaatgctaaaacttctacgtctggcaaagcctgaagtcatgactgaaggttatatgacgaacagtcaagagaatttacggcgaggcttatgcggagcattacagcgagtattaaatagtggcaacggtcatataaacagatcactggttgatgcgtatcataaactgaaaaatttaatcaatagatcattgaatggtagattattgaatggtgccatctggtttgatgacgcttttaggaaattaaacgatggtcacttcaatgatgatcagattgcaatgtatcgtcatcaatggattgatcaattgatccgtgatatcgatgctgcaattaaatactccgaaggaaatactgatgaagcccaagatctacgctggcatcgggagtcgtgagactcctgataacgtgctggatgccatgtattccattggctacagcatggctgaacaaggctggggtctgcgctcaggtcatgcacctggggctgacactgccttcgaaaatggatgcattgcagctggtggcctaaaagagatcttcgtaccctggaagggtttcgagggcgctcctggcatgcatcctggctacaccgtacccaagttcgatgatcacctcatgtctcttgctgctcgcttccaccctgcgtgggagcgttgcaaggacggagccagaaagctgcatgcacggaacgtgtgtcagctcctgggacgtgatcccaagaacccattgatgacctcggtcgtcattggctggacacgtggagccaagggggaaggtggcaccggtcaagccttcaggattgcacggcacttcaacattcccatcttcgacctcgctgaccctgctcagtgggaccacctcgctaaatttgtggagaacttcaacaaatgaaatacatcgtcgctcttatcgcagtggcaatgatcatgttgatcgctgccttcgcaccacagctgatgcaactcgcctggggtctcctggccgtagtgctgatcctctttgctgccctggttctgaccggggtagcaatcctgctctggacactcacgcgcgtattgcgtgggtgatcccctaatcctgtgagactcctatgtcaactcgcgtattcgtattcggttcgaacgaaggtggcatccatggtgctggtgcagctcttactgcataccgcaaacatggtgctcgctggaactatggctatggccttcaagggtcatctttcgccattcccaccaaggaagccactgacggcaaagtcggtaagacattgcctctcgaacgtatcaatcaatacgttcagggctttcttgcgtttgctgctggccatcctgagcttgagttccaagtcacccggatcggctgcggccttgctgctctgagtgatactcagattgcacccatgttcaagggcgctacttcgaacgtcttgttcgatgaagcatggcgttactttctcggcgagaaatacaactactggggcacattctgatggagattgatggctggaatgaattcctggaagctcgtatgcgtgtaattcaatctgctcgtaaacaaggactcagtgaaattaaaactgctgagcttgtgaacatcacaagcatgacgcaagcattattactgatcgctcatgctgatcgactcaacaaggaatctcatggcaactaaaattgttcgatttgatcgagcttactttgttctacaaccactctgcatgcattacttccctacagggggtggtgccaaacattccgtaggacgaattcgagaagttagcttcaatagtattggtgaagttactcgcttcgagactccaactactgtttacgtacaggtgaagaatgactagcaaaaaagttacttatgctcttttcaatcatgcgactaacaggattgttgttgactttggcaacagcgatcgatcgcttgctgagtacatcgaacgatacaagaagcaacacggtaaagcgcccaacgcattaccggtcaagatcactaccgttacaacggtcgaatcccttcctaactaaggtgttagtcatgagccaagatgcaacgatgcgtgctcatcaacagaagctcgaagagctttactccaagaaccagctgatcccaagggtcaaagctgagttcaacaaacccatcttcattgatcacatgaagatgcataacgtccctgaagacttcggcctgaacctcttggttcaaatcgctctgcacaaacgtgctgacctcaagactctgatcggtctgctccgtccattcgcaaatcataatgcgcaagctgttgctgatctgctggatgtttgtatcaacattggactggtccactttgattctgatcgtgatcagttcattgtacgcttcgaagttcctgaagaagtgcagcaagaattggatcgtttccagttcccactgcccatggtgattgaacctcttgaggtcaagcacaacatgcagtctggctacgttaccaagcatggttccatcatcttgcgtaataatcaccacaacgatgatgtgtgtctcgaccacatcaatcgcctcaacaagatcgctttcaagatcgatgacgtggtgagccgtctagtcaagaaccagtggcgtaatctcgacaaaccaaaagaaggtgagtcgaaggaagagttccaaaaacgtgtccgtgctttccagaagtacgaccgtgttgctcacgatgtgctggggcttctgacccaggaaggcaacaagttctatctgactcacaagtacgacaaacgtggccgcacatactgtgttggctatcacgtcacctatcagggcgcaccttggaacaaggctgttatcgctctggtcaacgaagagatcactaccgatgaatgagtataggattcagaatacttacgaagcagcgaatctcattcgtcagctggttatcgacaaagttcaattcgctgtgctctatgacgataagtcgaaagagtacgtcatcaacgcaatcgagaaggaataatttatgtgcgaacaatgtgaccagatgggtattccccatggttctgctctgagctttggtgtgaccagcaatgatgtcatcatggctgtggtctcagtcaatgaagtgatcattgatcacacacccattggcccatgcaatgaagaaactctgcaacgcatggaacagttcatcaaagaaatccgtcagcacatgctgctggaatctgccgtaccaaccggcaaggttaattgagatggcaacagaacgtgtgcactttcgtctcatcgtaatgccatgttgtcagcacatgttttgcaatgtaaatcctcgttggccttcattttgtcctaactgtggaaaacatgttttccctgaagtacgtggtggtgcactgatcagtgatgacagtgctaccctcaaatacgacgaaacaaagaagccgtaatatctcactgaattctcaagacgcttaggagcagagaatgcaaaagttcaccggtaaacagtatctccaaattgatctggccaacaactttggcctagacaagaagacctgggacgaacgtctcagctggtttgctgagaatcagcacaacatcaatggcctcttgaaccaagcagatgaacctgcactcttcttcgctgggctgaaagcatgggactcgttcctacgtaaagagccgtctggctatatgatctcgctggatgctacgtcgtctggcttgcagatccttgcatgcctgacaggtgatcgtagtgcagccatgctgtgcaatgtgctggacttcagcgaagaagctgttgttcaacgtcgtgacggttacacagtcatctacgaagcaatgattgaaaacctcaaggctatcggcgtctacgctggtggtattgaacgtgatgactgcaagcaggcaatcatgactgctctctatggctctgaggctatgccaaagcaggtgttcggcgaaggcgtacagctgcgtgtgttctatcagaccatgaagcaatttgctcccggtgcatgggaactcaatgacttctttcgtcatggctgctggaatccagaagcttactccaatgactgggtgttgcctgacaacttccatgtccatgttaaggtcatggatactgtcaaagaagtagtgcagttccacaacaaaccctatgacactttctatcgtgtcaatcagcctatggaagaaggccgctcaatcggagccaatgtgactcacagtctcgatggcatgattgttcgtgagatggtgcgtcgttgtagctacgacatggatcaagtgatcaaggtcatcaatgcaatcgatgatcctcagctggaagccgagtctggccccaatgctgaaatggtcatcaagctgtgggatcactacgagaagtctggtttcctgagtgttcgcattctggattacctcgacagggacactgtgcactacgtcaacactgatgtcgtcatggacctgatccagactctgcctgacaagccgtttgaagttgtcgctgtgcatgactgcttcaggtgcttgcctaattatggcaatgacctgcgtcagcagtacaaccaaatcctcagcgacatcgctcgttctgacatgctgtctttcatcctcactcaactcctgggtgtgccgaccaagatcggcaaactggattcagacatgtggaaagaagttctacacgctgagtatgcattgtcctgataatctatatgggggctaccaatcggtggcccccaattctgatcagaaaggatagacaatgaatcaccaacgcctgcgttataacttcttcatcaataccctgggtcgcatcatctacgtcgtgcctgaaggcaaaaccggtggtccgaatgcccgcccaatcggcgatttcaagctcgaagagggtgaacaacgttccttcaaggaataccgcgaagacctgctgaatgagctggaagtggctctgcaaagcattccggatcaggactactcgacctacaccatcaagatcacctcttgggatggtcaggaagaagagatcctgccgaccaatccggtcaatgaaggtccccgcgaatctgacctgaagcctgctccgaccactcctgtgggccaagaacagctggaacatcaggaagaagaggaacagggcgaaaccgaagaagatgacgataaccggtaactgaaagaccgggtatcataaggggccgccatagtgcggcccctttgtcaatctccgtaggaaagtccaatgcccatgctgcaagtcgccttcaaacaggcaatccccaagatcgccctggtccaggccgacaatgctgccatccctggcggctatgtcgatgctggctccttcgatcatcccgatcctgtctaccctggttccactgtcctgtatcacggtgttcgtgatctcctgtacaagcgagctgagctggacatgggtatcgtcagcatccagcttgctgctggtgtggtggcgtcctatgtcactcaaatcgatgtcccctggggcaatcgtgacctacgtctcgatgacccgttgtacggtatggaccgcctgaatgctcgtgcatggccaccgcatgctgctgatacctctctgacgtacgcttcaagcgatccgtctgtgatcagcgtcagcgaggatggaaccatcattgcccacaaggccggtgctgtcatcctgaccatcaccgctcctggcagtgaaggcacccccaaactgaagcgtgagctgaccatcactgctggtggtttcagtgagaatccagccgaagaagaatcgcctgcttaattcgtttcttggatcaagcaaacgttgaaaagcccgcagaaatgcgggcttttttgttgggggagcgatagacaaagaagctcaagactgtccgaaccaactacccaaaccttcccacataccgttatagccctcagccatctcagacagagatgctggtgtccgtgccttgatcagacctaccgccttacctgctgtgtaagcagggatagcaaatggtaggctcaagccggccatcactgggctggactttgcccattcacgtgcaaacgctcgatgctccaacggagcaagctgagcttgccttggatcattcgctggaatatttgcccgaagattgagcaaatctgcatgccccatcttggtgtaatcaggttgctccattgtctaagccccggctcaagaagccgtcatcataatccaaaggatatcccaatgctcaagtggcttctcaaaagaaagaactccaatctggatgttctcagctatggcgtaatcacgtacctcttcggagctgaagtgattggacctattgcatacattctgctgatacttctcattgcagctttggttcaaattgctgaaatttggtacgaacggaattacgaagattaaggatttttcatgcgcccaagcaaagtatacaaacagaatgttcctactgtgtttgagcaattgatgagcattccttatgacaaatggttagtgatcactagaaccatggcagctggtggtcccagtcgtcagaaacgaatgcttcaagatctcaaaagcatggcacagctggccaatatcaaagtcactactattgaccctactacggatcagtacttagggactcaattcaaaattggtaagccaacccccaactcattaaagctctattcttaatagagaaatatcatgaaaaaagatcgtcgtaagacgatcattgagaagatagaaaaccggtgcgacattgttgacaccggctttcgtatcaacggcaaagcatctccttgtcatctatggacagggccgacatcaggcacaggtcgtggcgggggctatggccgtatgtgtctcgatggtcagactgtagctgtacacatcgtcagctacactcactacttcgggtatatcccgagcaaaaaacaaatcgaccatctctgcaatcaacgtgcatgctgcaatccgcagcacttggagttggtcactcatctacaaaaccaaaggcgacgtgacaaacgagccaaggagaccacatgaacactgaagagaatgacgtcttaggttttcgtgcggatggaactcctatccgtaaagccaaacctgggttcctaacgactgctgcattcatcatgtgcagtcattgcaataaagcaatcagttcaagcggcgggccatcttatggtgcagtctgcattagctgtgctcagtgcaatcattcgcaagaatcagaggaatcttttgaatgagtaaaacaatctatctcgatggcacagagactctgatctacacacgttcactcatcgaaaataattaccgtccaaactcgatggtcagtttagatgaaatggaagttgtcgaatgtattagaactgcttgtctttacccagggcagttttgttctatcaatttctacacaccaaaagatccctacaaacgagaagctttagctagaaaatttctagctgcactcgatcttagggaacatcattgttacgaattacgtgttcatccttatcgtatgagtttgatgatcagaaatcatcgtcgaaatgaccaattgcaatatcattatccagtagaggcacaaatcccatggttgaaatccactccgtaaatagcagacagctcggatcaatgatccagcaatgtctggaagcaggcgtagtacctatgatccatggttcccctggcatcggtaagtctgctgtgacgcatgcaatcagcaagcgtaacaatctcaagatgatcgatcatcgtctgagcactgctgctccggaagatcaaactggcctgccatttcgttctgaagatggctttgcccgtttctctcctttcgctgatctgtttccgctggaagcaactccattgcccaatgggtatgatggctggctgctgttccttgatgaactaaattctgcttccaaagcagtcatggcatctgcctacaagctcattctggatcgcatgacaggtcagcataagctcaacgagcgttgcatgatcgtcggtgcaggcaatctcaagactgaccgtgcgatcaccaatgacatcggtactgcattgcagagccgtatggttcatctcgaaatgcgagtagatcacaagatctggatggaagacgtagcactgactcagaagtacgatgagcgtatcgtcggcttcctgagcatgttccctgaccgtctcatggacttccgtcctgatcacaatgaccgcaccttctgctgcccacgtacgtgggacttcatgaatcgtcttctgtacgatcccgtgaatggaaagcctcgtgaagtgctggacagcgctgctgctctgtacgcaggtaccatcacctctggtgtggctgtggagttcatctcttactgccgaaacgcagctgatctggtcaacatctctgaggtgttggctgatccactgaagtgtcgaattcctgacacggcagctgtacgctgggctacgacaacccatctgctcaatcgagtcacgaacgataatctgggagatgtgctgaagtacatcgagcgtatggacgcaagcttcaaaatcatgtttgtccgtgcactcgtgattcgtaatccactggttgtcactcgaccggaatatgcaatgttcctgtccaagatgaccaaccttctcaatagctgagccaaggaggctgtatggcattctctgccgtcgaacctaacaagcataatctgacacatctgaatcatcagatggataaggccaagaccaaaatcttcctcgggaagcatagtggtttctttggctcgttgctgtgcagcctcgacttcatctggtctgaagatgtacctactgccgcaacagatggtatccgtctgtggtggaatccagaatggtttgcaaagcacagcatcgaacagatgtcagtcgtactgcgacatgagcttgatcatgtcgctcgcttgcatgccattcgtcgtggtactcgtgatcccaagacatggaattatgcatgcgactatcgcatcaacaatgatctggtcaacgatggattctccttcaaaggactgaagccattgctggataagcagtatgatcaaactggcgtgcttgcttcagaagaagagatctatgatcttctactgcaacagagcctcaaccagaatggctcatggggcagcggtgacgttgacctagaagaagcattcaatcttcctgtcgaagaacaagctcgtgccatcaacattgtcggtagtgctatcgcagctgctagtgcagcaggcgaaggcattcctggcgatgtcacaaaggtcatggatcaattccttaaccctgtcattcaatggcagatcgttttgatgaagttcttcactgatcaaatcgatactgactacagcatgcgtcgtcccaatcgtcgtcatgacgacatctatctaccatcgctttgcgatgaagatgatggccgtctggaatcactactgtatttccaagacgtttctggttccatcactgatgcagactcccaacgcttcaactctgagttgaagtatgtctgggaagtactcaaacccaagaaagtaaccatcgcgcaattcagtactgagatcaccaaggtcgatgtactggttgaagaggatcgattcgactggatcgaaacctatggcggtggtggtacatcactcgttcctgtgcgcgagatgatcctgaaggaaaagcccactgcggctgttatcttcagcgatcttgaatgtccaatcatggactgcacaggcatcacttgcccgatcatctgggccacgattcgtaatcgtggagccaaggtggaaaagggtcaaatcatccacatccgctaaaggaaattgcaatgtccattcgttctcgtatcgctggtatcgcctctgccgttggtgccaccacgttggcagctaagctggctggggagcctgttattcaggcacaagaacctgctggagttctatctcagcctgaagtgaagcgtcttccgcgaaccaaagaaagctggtatcagcgttgggtgcgtgagcgtcctcggcgtctgcgttattacgcaagctacaaaggcggaaagcatcgtcgtggcgttcctgcgcatatccagcagcagtatcagattgatgctgaagcgaagcgtggtcgtaagcgagtgaagtgtgctcgtgatcattcgctggctacctacaacaatccttgcttgcaggactaaacaagccatgatcatcaacagccacgtcctgctgagcaaggcacctatcaaggacatgttcgctacgaagcagtctaatggtgatgtcagcttcggcatgtccgaggctggatatgacattcgtatcaagcaagatgtgtgttttacctcatggcaccctaagttcaaacgctttcagcttgcatctgcaatcgaagaatttcagatgccagatgatctggtgggcattgtccatgacaagtccacttgggcacgtcgtggactgtccgtcttcaacacggtgattgaaccgggctggaaaggattcctgactttggaacttgtctaccatggtcaaggggacttagttatccctgctggttcaggtattgcccaagtggtgttccacgagactgctgtagcttccgcatacaatgggaagtaccagaaccaagaggatatgcccgttggaccacgacaagcctgaaatcgactacagcaaataccctgagccgcctaggccaaaagtgcctacgcatccgctcagggtgtttactgaacgaccgcctagggaacatcttcccgaacctgtgaaccgttggcacaaaaacattactcgatctaatcgagcaaggtgatctatgtcagtacccctctgtcttgcttgtagcaaagaaaatccttgggtattggctagcagtctatacacagaaatctgtgctcaatgtgtagagtcagaccctcgcattgatataaatccagagactaatgcttacgcattattcgggtattgccagggtggttgtgatagacgtggaccagtcaactatggcagacatgaaacagaattcatgtactactgcaatggatctttccactgcataccttagctctttccctgggttcatcccatcaatcaaacatggagaaatacatggcaactgccaagaaagtcgcatcgaagaagactgccaaaaaggctgtcaagaagaccgctaccaagcgtgcctacaatcgcaagcccaaggttgctctggaagaagcaggcattgtggaagatgctctgaatcagcaatctgatgtcaaagctgacactgcatgccaagctgctgtgcaggacactgctgttcctgtcgttcaactgaccgactacagtctgtgggatctgcgtgcactgccgaaggtgatccgcattctgttcctgttggaactggaatcgttgggctatctgttgcagcctgatctgattgttccgagccaaagttcggtcatctgcaatactgacctgatcgaaatcatcaagttgaaccacaacaacaagctgatcaatttcgctcaattcggtgagttggaactggatcacggtgtgatcgcagagccgacctatctggaaagccgtctggacattttcaatgtccgtacttcgcgggctgctccaaccgagatcaccctgcaaggcgaacgtttcgttcgcatctgaagttgaaacggtgtcccaggcccatgaacctggggtatgtcctctgggaggactgtatgaggccgtgaggctctaagaccatgcagacaggctccgtcctggcagagggtgaaaacccctcacctactgagagcattgagaagtccgcttagagcttgttcaatacgctccgctctggttgcaacgctgatcgtatgcagcttgaactaaccggacaattcgaacatccacaacgcatgttgccgaaggctgattgcggcggacttctgagtgcttttaccccaatcaacaattgtggagaacagtatggcaactcgtatgcatattgttgtttcagacgacttgaaaaagcgtcttgataaaatatctgaagaaaacgaaagtacttcttcagagacacttcgtaaagctattgttcttttttgcgaagcacacgaacgtaagaaacgttacagcaattcaaagctcgggttcttcaacgaagaaactcgcgtatttgccgaaatcattaacctctgaggtaatcatgtctgaattcaataagttcggtgcagctgttgctgcacgcttcgccctgatgtgctcattcggtgagctgtatcgcacgactgcaagtgctgatgaactctgggatctgtatttggcttccttccctgaaggcaccaatccgatctttcgtgaacgtactgagcatgatggttcctatgacaggaacttcatcaagcggcttggcaacgttgttgctatcgatccgagcaacgatcaagttgtctcactgtggaacagtctggaaaatcttccatatccctatgatgtggtagctcaaaagatggctgatcatgttggtcgccacgagattacaaatctcttccgaaccaaggagctggatgcaggccataagccgaacttcgagctgatcgatggtcgtcagcatcagtggacacacttctatgttcgtctgcccaacttcgtcatcactcgtgatgcaggtgctgctatcggtcaacgtgcaacgaatgtctctgtgatgttccgtagcctgactgaaatcaaccagagtgctatcgtcgatgttctggatctgatcgagcagaatgcgctgtatcgtggtgaagaacacaagcctgctctgctggcatttcagaaagcacagaataactttctgatgactctggaaggcaagcacaacacgtggctgtggaagaacagcactaacaatgtgctgatgatcaagaacactgctatcggcactctgctggtagatctgtctgatggcatgccattggatcaggcagtgaagtcgttcgagtcgaaagtggctcctgccaactacaagcgcacgtctgcactgatcaccccggctatggtcacaaatgccatggcaaagatcgaagaactgggctatgccaatagcctatatcgtcgtcatgctgtgctggccgatatcaatgtcaatgacattgaatgggctgatgcttcagccaaaaatgtcatggctggttcgatcggtaatgtgctaatgcaagctgctgtcaagaaggctcccaagactgacactctggaagaaatcaacatccgtgagttcatgtctacagtacttccgaagaccacttcaatggaactgtttgtcagcaatgctctgacccagaacctgatcaatatcactgcaccggaagatgcagatgctccgtcaatgttcaagtgggacaatgcctttggctggtcctacaagggcaatgtgactgactcgatcaaggaacgtgtcaaggcagctggtggcaatgtcaaagcagaccttcgtgtctcgctggcatggcacaacagtgacgatctcgatctgcactgtgtgacccctgatcgtgaacacatcaacttcagccacaaggctggcgtgcttgatgtcgatatgaatggtccatatcaaaaggatgatcgtaatcctgttgagaacatggccttcatgcgtcctcaggacggtgtttacaccttcagcgtcgatcagtactcagctcgtagcaacaaccaaactcatccgggtttcacgttgcaagtcgagtgtggcggtgaactccatgagttgacctatcagcctgcaatgcgtagtcgtgcaatggcctgcatctctcttgagatgaagggcggtgtcatcaaagaactgaaggttctgaatgacaagttgattcaccagggacgttcgcagaaggtcaatggtgtcaacactgagtcctttgtccgggtctcgaccatgatgttctctccgaactactggggcgatcaagccattggcaacaagcattacatcttcctgctggaaggtgcacaaactgatgaacctgttcgtggtatctacaacgagttcctcaagtcacatctcgaagcacaccgtaaggtgttcgaagtgctgggaaccaagacggtgattcagccgcagggtgaacagctggccggtgtcggcttcagctctactgttcgtaattcggcactgatcaaagtgtcgggtccaaccatcaacaagacctacaaggtcatgttctaaggaatcaacatgtctgagaaaaacattttcgaggaagccactcgtgctgccgctcgattcccttcgccggttggtgatctctcaaccgagcaactctggtcgctgcccttgacttcgctcaagggtgccaacctcaatgacatcgctgtgaccatcaaccgtgagttgaaggcacagggtgaagagtccttcgtggacaccaagcccaatgcgaagtcggctctcctggctctgaagctggatgtgctcaagcacatcatcgctgtgaaacaggctgagaacgtcgccaagctcgacgctcaacgtcgtgcagcagagatcaccaagatcgaagagatcctcgtgtcgaagcagacagacgccttggcgtcgagttctgtcgaagacctggaaaagcgactgacagaactgcgcaagtaataccgttttatggattacctaggtgtgcaacagcggaacgcttggacaatagctatgtccgggttaggtcattcgagcgggtcggcccgtaccaagaagctgccaagacacttaccgcaccaccgtccatgggggtgagaatgtgaaggatgaaagcggccttcactaggtaatccgccatatgtaagggggccactcaatagggagtggccccatgccaatctgatgagtccgttaggacgaaacacactctgtgtgtaattggctgtttgagatgaaagggcgctaccctggaatcaatattgttcagcccgttgtcgatgcgatcatcggctaattcagcactgaggatgtgctgcacctgttcagtgccctcgcaaggtacgttgaaccaggggacgcaagtaacccttagagacgtgtataaccggaagtctaaatccggtgctgtgtcctaacccacagtgagttgataccaaatagagaagattaggctcgcttggttaagcactcgtagacttggcaactacatacacgtctcgccttcatatatttgaggtagcaccccacttgtgctcttgtacaagatagtctaaggttgctgccacaacgctttcgcgggatagttcagttggcagaacaccggactcataatccggatgtcgtcggttcgaatccgactcccgcaaccagctttacctgcctgtcgtgtcgtaagactctaagggcgtcgaactgcaagagctgattgtcattcgagaggagaggcaatccactagcagaggattttttgtaagactctgtgttgacgtgagaaacgctttggccgcagtacgataggcaggtaatctagtttcatgagggtgagtagctctggcgtggcacaggccatcaactagctggaagctcagtaacgccagggttgagttcctgacaccttcgccaatttcattgtgggatagctcagttggtagagcacagtcctgataagactgcggtcactggttcaagtccagttcctacaaccagtttcatgggcggactacggtagctccggtggggttcgactccctggccgtccaccaagtttgggtgggagtagtaggacacaagcgcgggaatttaccgtgcgtgatgctgcttccacccattagctctttgacaatggatcgggttatcagatgggcgctgaggcagactgtaaatctgccgtctccggactcgcttggttcgactccaagctgatccaccagtcaatcgtttcctgggttgttccgccgtatggacggcaagcggtcttgaacaccgtggcatccgaaaggttgagggttcgattccttaacaacccgccatccacttcatcgcaagcactctcgtaagtaggcacgcaggccatcgaccttcggggcagtaccgcgaacgacgaaaacgagagtgctctcgatggagagacaggatagcttcaatgcttcgatggttgaattccatccagccgagggaaatttaaacgggtaactcccgccttggttgccagcttggggaagcgccagttttaggacaagtgacagagtggtcgaatgtagctggttgctaaccagcagacttctcaagaggtccgtaggttcgaatcctaccttgtccgccatagcttcatgggattagcacagcttggtagtgcgtctgctttgggagcagaaggtcacaggttcgaatcctgtatcccgtaccatgttcaactattgctggtggaccagcataggcactcagcgaacctgtactgccgagtcttggtggaactaagacatagttgttcgaactgctaccacatgtacttcccctcgccgacaggtcagacacggggagactaccgggccaagggcaaatcccttggcatgaaccaagaggatgaaaaagtcttcttaggcgtgtggatagcagcacctattcaggggaatcgtacagcggttagtacctcagcctttgacgctgataaccttggttcgaatccaagttccccttccaatgctttttatggtgtgggtgcgatcagagcaatctgatggcttccataatgcaactacgtctacgtttcgtaggctagtgagcttctgtgcggcattagtacctggctgttgcagcctcggaaaacctgtcaagtacagcagtaggtaatcaaccctacgcccacgccgccatctatgccgtctttagaccttatagaagtgaagaacttcagctggggacggctccaattcgatccttccatgggtcgtaccttaaggtctggatggttatacctttcaaggacggacctttataaatgtctaccaaaggtagcctgtcttccgctatagaagaagatagttcgttgtgagtacagtttctttaaagtgaactcaccgtgcatacagttgcaggatttcaaacacgtaaactaccagaacctgacagatgtagtctctaaggctatatctgaagctgcacctagccgattctgtcggtcggtgaagaagcgaacatgtctgtattctggttcgacagccagtctaagaacagactcttacttcatggtgcagccccagatgttgcttttaagcaatccgacactttgttaacgagtctagcactcggcaaacggtgtccctgcatatgggtaagcaggcagatgtagttacagggcactcggcttatatagcgcactccctggaagctgcatctgggaattcttccgcaagttagtgactgacggtgtagctatcgcgctgccgttaaaacattgtgagacctgagagggaggtgatatcaccctagacggtcggcgaatattagcctgatcagctaaaaagctaggagaatttccagatgttgcttcaacaagaagagcgtatggtctatcaaccatgacgcatagatgcttggcttacctaagcaacatcgtctacagacccactatgctgagtgctcaacagagagccatagcttccgaatgtgattcccctgtcacgctagaagctatgcggattcgcaattcggctcagctcccccttgaaagctcagacattcgtctgggcttttattttttggagatcatcatgagcgataccttcgaccatgaagctgaagcgtgggatgatcattgtcttggggaaagacctgatgatgatctcccagcattcatgcgtcgccgcagggaaccaagacgggaatatgtcccgtatgaaagacctgccccaacgtatcaagctttccctctgattcgtgaagtacacgagacagagaaggctcatcttgttgtgttcactttcgatgacgaagacatcgagaggtggcttcccaaatcacaatgccgcattccatacgctgacctgatcgagatatcgacatggctcgtaggtcgaataaaggatgagatcaatgcccgataacaaaaaatcaaattcatgcttgcccataaccgataacctgattcgtgaaatatttatccgcaacgggtttgtcatcaaagacggtcacaaggatttgaagccatatgtgtatgcagccgcccgcgaacttttagacgccgcccgccagcacgcgggacagtacagcgtcaagacggaatccggcgaacttccatgcagccttgcagtggcttcagaatgggagaagcgcgaggaatacatcgcatcgctggaggcccgccagccggtaggggtggagcctgtggcgaaggtgcgacaggatggcggaaacgggccggttgtgtggtactacccacatacgttctatgggaccaatattccagacggcgctgacttattccttggcccgcctgctgctgtgccgattgatgggatcactgccgattgggtcattggctacttaggtagtggtgagtccaagctgacgcataaggcgattaggtacgcattttcagagtttgcagcactcgccacccaacccaagccggcagcggcgaaggaaagctcctaatgatccaagagctattgcttcttctgggaatcatcaaacgtcgtaacgtaaacaggtattacagaaatggctagacccaaacgctctgattggtcatatgacatgaccaaagctcctcatgataaatacatcgtggtcgaagggaagactgacatcaacaaaagctcaagcgactttgttgctatttggagtgatgtgtacaacacattcatttccaagactggctgggtcattgttggagtcaatcgttgggctgaaatcctatgagtgatgaagccaacattgctttcaaaaactggcttgctgcgaagcgagctgccaatccaaagtttgctaagaatgctgatctgaattctgctgggaaccatgccattgaatatgtcatgcgactggcgttctatgcaggagtcgaggcaaccattcaactactcggagacgctcatgtcgaagacgaagagtgacttgatgagtgatccactcatcaccaatgaagcactggctctagctgtacgtgaagaagctatggtcaaagatatggaccatattttcgaacgtgcgtctatcatcgcagcagagcaggagcttgaaaatgaaatccgttgatcaaccaatcatcatcgaagactcaatcagtccagaaggcattcgcctgacgacattccagctccgttactggcgtccgattcattcggaattgatgacacatcgtgtcttcagtcgtaacgccggtagcagccgtgcacgaccatccaaggcaatcattgaacaagtccgcactgacccctggggtccacttcattggggagccaatcagcccggcatgcaagctgatagcgaactagacgaagaaacgatacagcgagcaaagaaaatgtggttgtttggggcagaacgagcagcaatgactgctgaagctctgctaggcattaatgcccataagcagatcgtcaatcgtttgctggaaccattcacctacatcgatgtcgttgtgacagcaactgactttgccaactggtacgcattgcgcgatcacacagatgctcagcctgagatccgcaggcttgctgaattgatgaagcaagcgcatttggaaagcattcccaagctacttcagccgggtgaatggcatctaccatacatcagcaaagaagactgggttgaagcagcataccgaacgatcaatatcgtaggtactttgagcttgctcaagaaagcatctgctgctcgctgcgctcgtgtcagttacaaactgttcgacggcagcaaagccaactttactgatgatctcgaactgttcgatcgtctacttgtcagtgagccactgcatgccagccctgctgagcatcaggcaacgcctgatacttacaaaaagcataactggcgaaccggtgaatcacctcattgggtcaacccacggttgcatggaaatttccgtgggtggaatcaacatcgcaagatgctacctaacgaatacgtcccaggctaagtcatgaagatcgacaacattgattttatggaattctcagtcaacggtaggtcacacaccgaagctgtagagtcatttgcagaaatggtagaacagtacaaaaaagactgtgctagtgcataccactttgctatgaaccctgatccagaaattcaatggggtttgattcaagtaggctgtgctcttgcaaatctcacagtgataccttttgaacaagtgagcgataagcgttcctggttcatgcgttatcgaatcaagcgaagcgacgatagtcccattgaggactatttgtttctgagagctgatgactacatgcggttcctatagaccctttgtttgggttaaacccccttcgcagtaatgcgttgggggttcttttttacatcacatttttggaggttatagtggaagtcgctaacactgaccgtaaggtcaacgctgcactcattggtagtgccggtgaatctcatgcggtacaggttgcgggcactcgtgaattcatcgagatgctatcttcgaatctgtactctcgacccaaggaagccatgatccgtgaggttctctgcaatgcagatgacgctcataaagaagctggctacacaggtccaatcgaaatcgtcatcgaagatgacaacacactgatcatccgtgatcgtggtctgggtattccccacgacaagatgcatctgatctacggtacctacggtggatcaaccaagaagaaagacagcatggccactggtggcttcggtcttggctgtaagtccccatggtcctacacagatgcattcaccgtatccaactgccatgcaggaaccaagacgatcaacacgatgctgcgagtaagcaacgatcatggtggtctacctgcgatcattccgattgccaacttccctactgatgaaacaggactggaagtccgcattgatattaaggcaagcgatcttcgtgagatccgtagtctgatcatcaatgcagtccaccgtggcggcatgaatgcaactctaaatggtgatccattggagcgcatcaactatcccgaagatcagaagtacgtgttcgtggagaacagtcaccttggtcatcagatcatggtgaagtatggtgctgtgctctatccagttgatgagcaagatgtctatcgtgaagcctacaagctgatcactgagtacttgagccataaccagacactgatcctcttggctccagcggatagtttgatcatctctcctaaccgagaaaacgtttcgtatcttgacaagactcgtaagcagctgtacttgctgctgcgtgacttcatggaagagatcaacaagcgtgcagaaccttatgcacgcgaactgatcaacagaacgaatgttgctgaaatcaaacactcaaagcttagctggttgcgatatctaaataggattgattggattagtcataacttcatcaatcatggcaagtccaatctcgatgtgtttggtcgagtgattcactcgatgctgacgcacagctatccgcatcacttgcataaaaccagtctgaaacaacgcttcaaactcagtcagcaatacgtcagtccaggctgggaacaaatgatgcttttgaagttgagaactgaagcactcaaaaattcaagctcacacagcaacagctttttcaagcaagctgtgtttcgtttcttgagcttgactcgacgtctcaacatcagccctagtcaaattcgtttcggcgagcgtgagcaaatgtacatgcgagggccagagtacaacaacggtcgctttactagcatgtctgttcctattcaagccttcagatggaagtctaacaaagacttgaatgagcaagctatttggctcagacctgctgtagtgatcagtcacaccatcaaaggaattgatgagtcaaacgtacgtaattcccacgaagcattctttgctatcgtggtgcctcgtacaggcagtacgcattgcagcatcgtagatctgattgcttactttaccaaagctggtttcactgttaaggatttgactcctgatcagaagcttgttgctaaggttaaaaatgatgcaaaggttatcaagtacccggtgcttggtacattgcgtcgtatcaaagcaaccacttacggcgataagtacattctggaaaaagcattgtctttgaatcttgaagacactggctgcgagaagcctttggcttacatgaagattgcttcacgttctggtagctatgtcacatcgccactaggcatgagagacgatgactttcatgtcttccaaccactgctaccagatgacactgcaattgttacgaccgaagctgaagtcaagaagctgaagaagttaggtgcagtagactatcgtgaagtgatttacaatgtagttgctgagatggtcagtgatccaaaggttcgacaagcgtatgcttggcgtccaaaggatagtggtcacaatcaacatagccgctcgatatacaagacaatgttctatctcaaaagtgcttggtatcgggaaaatttccgcttgccagaaatcagctatgacaaggagatgaaacataagctcagtttgctttatgcatttgattcggctgctcattggttgttcgataaggactcaccacttgctgataaaaagaacatagcaaagcttttgttgaaaattcgtaccagtaaagaaccatggaaggtgaagtacatgtacgacttcattgagaagaacccaatgttccagggttctgtcaatgtcgatgaaatcttggacctgcaatcaaacacaactgacaccaagcttcttacgaagctggatcagatcctcaaaatcgttatggagtaattatgaaaattacagtcgtagcagccatcctgaaggatgacagccttacgcttgttaccaatgaaggcaagtatcacaaacttgctcaaggtgacaatcgtctccgccctattctcgacttggttctgccggaagtacaagccggccgttctatcgaagtggatctcgctggtgctatcaccaacgcttatgaagacttcgaaaagaagtcgaatggcgtgatcaagttcttccgcgttgctcgcaatgcattgaagaaatggttcggcgacaacagccttgctgtttcggatggtacctatggaaccattccggacacgccggctgaagtcgatgagatcgttcagaagctggaagctgagccagagactcgtgagcagactctggaagagatcatcgccaattcgaagcctgtgactggtctggtgtttaacaccggtacccaagacaagcagctacctcagcatgagactctcattgctgttgtggatggcaaagagatcattccgaatgcacagcatctccatgctcaggtggctcatgccagcaagctgggtagccctgctgcattcgagaacttcgctcgtctggtgacggcagtgaagcgtcagcactcgatggatgatctggttgctttcatcagcaagcttgatacacctctgactgatgaaggttacgtcttggcttacaaaaacctgtcagctacttctgaagttggtgtgtatgtcgatccgtacaccaggaaggtcaagcagcgtgtgggtactcgtgtctgcatgagcgaatctttggtcgatcccaatcgtggtcaggactgttccaacggtctgcacgttgccagccggtcttacctgggtagctacagcggcagtggtggtacgttcttgattcgtatcaaacccagcgatgtcattgctgtgccgaagtacaacacgaacaaaatgcgcgtctgtgcttacgaaatcttgggtcgtctgagcactgaagatgctcaagctgtgtgcagcaaccgtccaatgcaaactgacgaaggcaagcgcctgctggccgcagcaatctccggcaagacagtggcaatcaccaaccaagtcgagatcactgcatctcacggtggcggctgtgtttacactcagctcggcgaaagcaatccaggtcgtgtgttcgaacgagattcgttggaagatctgggcatggtcgatcctatcgatccagatgcaccttccgatcacacggctgcacctgtggcagtcgaggaagtcgccgaagtaatcgagacgaccaacctgactcgtaaggaagcagctgctgtgctgcatgctgcatgggccaagctggtcattgatggagcagatgacatcctgacagcagaagcctacaggcagctggtggacttcaagcagcgaaccaaggtctcttgggcaaagctgggcattccgcatcaaggcaacaccccagttgctgacttcgttcctcctgaagttacacctgccaaggttgctgagcagttcaatcaagcagcagcaccggaagaacgtgacgaagaggcagatgccgaaaaactgaatgatctgttcatgaagttcaacgtagcagatgctggcggcaaatctgagtacgaagctggaaccgagctgatcaagctgttcaaggactatggctttgcctgggacgaagacggtgacaacatgcttctcgacttcgacgaagcagacctgggtagcgtcagtttcaccgtggctaactatgaacaggctcagcttcgtgaaaagttggcaccgtctgagaagccttctaaggccaatgaaggtgcagctgccactaccgtaccggctgatggtggaacgcctcgtcagcgtatccgggcgctgcttgccaagggtccactgaccgtaggcacggccaaggaaatcctggctatcaagaaggcagcaaagaagggttggtcagctcttggcgtcaacggtgaagagtcgtacgacatcgagcagcaggccactggtcagtaaggttcctaccaagacaccctcagttcaagttatactgagggtgtctcaatcacaggaaccaaggggatgagtaacgtccttcgtgtcaaccgcaaggctaccgatggcgatatcgttcgcttgaatgcctgcggattctctctcaagaccatcggccagatgctcggaatccatccgactactgtcaccatccgtcttcatgctctcggagttcctcctgcggatactcggcgatccttcatggaagccgttttcgcggggctggactctgcacagcaggagtggctggccgatcacctcaacgctggtgtatccgtcaaggactacatcaccaaactggttatcaacgcacatggacaacagcaacaatctgctggcaacactcaactggtttcggatagcgaagccgagtccgacgcagcgtgacatcattgtccagactggcgtgcactttgaagaagtgaccgaacatctggacactgtgacaggcaacgatgtggaaacatcactgctggtcatggaagcaaaggatgcactgaagcgtctggctgatcatatgaagagtgaaccaattcgctactcataccagccggaagatcatctcgaactactggacgctttgtgcgatcagaacgtcactggtgtaggcattgcttacatgctgggcttcgaattcaatggtgcaatgactgaagtcaatggctccaacttctccaagttcgtaaacggtgaagcaatctttaccgagcaaggtaagattgccaaggggccggacttcttccgccccgacctcggaccatatctgtaaagcaactaatgcatagcccctcaatagaggggctttctatttaacggagtgacccatggaaacacctcagcgcctacccctgaaccagggacagcaagccgctgctgacggcttcttcagcttcctgctgaatgatcagcaaaaagaattgatcatcagtggtccgggtggagtcggcaagacgttcaccatgggtcacatgatcgatgaagtcatgccgacctactacgacgcatgtgacttggcgaacatcaagcccaagtacaacgaagtcgtgatgacggcaaccaccaacaaagctgctgccgtattggcagaagctaccaatcgtccaacgcagactgtgcattcattctttgacctcactgtcaaagaaaactaccgcacgggtgaaacagaaatccagcgtaagcgtaactggatgatgaaagaaaagaagatcatcttcattgacgaatgttcaatgattgatcgtgagctgtatcgtgaaatccgagacggctcgctcaatagcaagatcgtctatgtcggtgatcacagccagctggctccgatcaaagaaccaatctcaccgatctacaatcagcgtctgccgttctacgagctgacgcagccgatgcgtacgaacaatcctcatctacaagcgctcaatcagcaactgcgtaacactgtggaaacgggaatctttcatcccatccacttggttcccggtgtgattgatcaatacaacggtagtcagatggaagaagctttccgtcaagagttcagccaacagactcgtgatgcacgtgtcatggcttacaccaatgcacgagtaattcagtacaacgattacattcgtggtcttcgtggaatcagtggtccatatcaaccgggtgaattgctagtctctaactcagctactcagctgggagatggcatggcattgtcagttgaagaagaagttgagctgatcacttctactacaactcctgcacctgtgcatctggatgatgatgcaaccatcgatgtttattacgtcgatctggaatctgcttacggctactatgcaaacgtcatggtgccagctgatcgtgatcactggaactcgttgatcaagtggtatgcacaacgtaaagactggaagaattatttccagctgaagaacatgtatgccgatctgcgtcctcgtgatgcatgcactgtgcacaaagcacaaggtggtacctacaagcatgcttacatcgatctggatgacatcagtcagtgccgcgatccaaaggtagcagcacgactgctgtatgtggctttcagccgagccaaggagagagtaatcgtctatggagatctggctgaaaagtttggtggactcgtgaggtgatgtatggctcgaaagacatcagtaccgccaacagtgatgttcagcgttgaagttcttgaagcattgcatgcaccagaagaacgccgtattgatcgtgagatatctgagatcaatcgactcaatggtgaaatcaaaaagatacctaacccaactggctatgcctacttgggtcaggtgtttacgacacaagagttcaaacgtattgctggcaaaaatggttggccacaactagacacgtctctttgggatcgtgctcatgatgtgcttgaagatcagaaagctgtgatggctcgcctagcagctgtacgtcagtacatagcactggtcctgaccacaagcatgactggtgaagatcgtcgtaatctgattcctgattacattgcttcattagccaatgcgacaatggacattgctcgtaccaaagatatcgaagaagtcttacctcgattcccaaagatcgaaaagcaatacagacttgttgaacaaacgatggctgtcctggcagcagggcaactgatctactaggagttgccatgcgctatctgacttatcaagagcacacacgaggatatccggtgtgcttcttggtacctgctatcgacaaggatgcaatcaagcgtgagtacatcacgccattcaacgttaaggaagaagacgtattagtactctcgttgcatcagagtactgaaaagaaaaaaactccagctgccgaaatgaaagagtacatccagaccatgctggctgaggtactcactgacagctatgtgcaatacattgttgtcaacgacagcgaatacttcaaggtactgacgaagagtcagtcctctgaagcaagcttgggatacgtcatggactgtgtatacggcccatggaaagtcatctacgtcccaagctttaaagcggtgttctatgatcctgtaaagatcagacacaagattgccatgggcatgaaagctttagttgatcatcgatcatctgagtacaaagcccctggttcagaaatcatcgagttcgaacactatccagaaaccaatgatgaaatccagttcgcactggaaaaattattggagatggattgtgacctcactgcggatatcgaagcattcgacttgaagcatgacaaagctggtatcggcacgatctcgtttgcctggaaccaacacgaaggtattgccttcttggtggattggaaacaactcagtacagagggaccaatctttggtgccaatgtaaagaatgatcatgtccgaggactgctggcagacttctttaggaagttccaaaagaccggtcgtaagatgatttggcacaacatcgctttcgatgcctacgtgctggtgtatcagttatttatggaacatctgatcgacacagcaggtttactcgatggcttgaaaatcatgctgaccaattggcatgacaccaagctgatcacctacctcgcaacaaatagctgtgcaggaaacaagcttggtctgaaagagcaagccttggagtactcaggcaactatgctgtcgagtcaatcaaagacatcacaagaattccaaagcataagttgctgaagtataaccttgtcgatagtctttccacttggttcgtattcaacaagtggtaccagaagatgatcgatgatgatcaactggatatttacgagaacctgtttcaacccagcattgtagacatcgttcaaatgcagttgactggtttacctgtcaacatgcaaacagtgcacaaagtcaaagtattgttagaagctgacgagctgaaagctcgtgatcagatcaacagtactcaagtgattaagcaatacaactatcgtcgtctcgaagcttacgttaagcgtaagaatgaagagtggaagaaaaaacgtacaacgattgctgagacacttgaggcaagcaaaacgaacgagaagatccgtgaggaaattacgttcaatcctgactcaccaaaccagttgcaagacttgttgttcaacatgctgggcttgcccgtcattgaactcaccaagactaagcaaccggcaacgggagccaagacgatcaaagcactcctgaatcacacgaaagatcctgacgtgttggagttcttgaacggcttgctggactttagctctgtcaacaaaatcctgaccagcttcatacctgcattgctcaatgcatcacaaggtccggatggttggcattacctgttcggtaatttcaatctaggtgggactgtctctgggcgtctgtccagtagcaatcctaacctgcaaaacttgcctgctaattcgaagtacgccaagtacatcaagatgtgcatcgaagcacccccaggctggctgttctgtggcctggactttgcatcactggaagaccgtatcagtgcactgacaaccaaagatccagagaaactgaaggtatataccgatggctacgatggacatgcaatgcgagcattcgcatattggggcgatcagatgcccggtgtggttaacactgtgcaaggcatcaatgccttggcagacaagaaacatccgtacttctatctccgtcaagcatccaaggctccgacctttgcactgacctacgcagggacattcaagaccctgatgaagaactgcggtttcaatgaagaggaagccaagaaaatcgaggccaacttcaagaagctctacgcagtttcgatccagtgggtcagccagaaacttgacgatgctagccgcaatggctacatcacagcagcctttgggctgcgtgtacgtacacccctactggctcaggtcatccgaggcaacagcaggacgcctcatgaggctgaggcagagggtaggacagcaggcaatgcccttgggcaaagctggtgtctgttgaatagccgagcctggaaggaattcatgggcaaggttcgtgactcagagtacaggctggatatccggccctgtgcccagattcacgatgcaggctatgccctgatccgagaggatctgggtgccgtggcctacgccaacaagcaccttgtagaggcagtacaatggcaagaccaccccgacatctggcatgatcaggttaagttgggtggagaactcgggatcttctaccccaactggacgaccgagatcacgattgccaatggggccaatgaggaagagattttctctaccgtcaacaaggcactggcggcgtaaccttccatcagggaaaagccatgtgcaactgcaattctcagactatctgcttcaagcgagggtctaccttcgctttcatgtttgaggttccagcagaagtaccagacggcttctttcgtaactggctccctaaagctcagttgcgaaagagccgatctgattcagaacgaggtttgattgcgaacctcgcctgctactggaacgacgatgtaaaggcacgacaagtcattgtccgccatcttgaaactgatcaattcccattgggtgaagctgagttggatatccgacttgagtcttccaacggtgaggcgattcacaccagcaccatcatcatcaaaatcgaacgaggcatcaccaatggctgacatcactcccaaggcgttcgacggtatgacgttgagccttgtcgctgtacctctgaagggtaatccaggcgagcagggtaaaggtctgcgtggtgatcctggcgatagcaattatcagctctggctgaaggctggcaataccggaagtctggaagacttcctgcttgccatgaaaggcgagaagggtgcagacggccaaggactgaccaatcgtggagattgggaagttggtctgtatcagccgggcgattacgtcttttctgctggtactcaaacggcgatctctatgtggatctaccgtggaagcgaagagttcatctcactggttccgccagatgaagacactgacaactggattgaatttgctgctgataccggcaagccaatcgagttgcgcaacaatggcgagaagatccaatggcgcatccaagatgcagctgagtggatcgatttgatttttgtatccgatctccgtggacctactggcctcaaaggagataagggtgacaaaggcgatgcaggtactggcttgaacaatcgtggtaactgggctgctggtacttaccagccgggcgactacgtattcgcagcgggtactgttgctgcaagctcaatgtggattctcagctctacgactgattacgtatccaacactgctcctgcaaatgatctgactcattggatcgagtttgctgctcctgccggaccggctggtgagcaaggtgatgatggactctcagtcaatctacgtaagacttccactgcaatccagtatcagcaaactggtggtccctggactgaccttgttccgctgagtgacatcaagggtgataagggcgaacaaggcattcaaggtgtaaagggagacactggtgtaactggtaagtctgcctatcaatctgcattggatggtggattcgttggaaccgaaattcaatggaatgcatccctgaaaggaaccaagggggatactggaacagccggcaagtctgcctaccagagtgctgtcgatagtggtttctctggtactgaagcacagtggactgcttcgcttaaaggagccaagggtgacaccggtactcaaggtattcagggtatccaaggcgtcaagggtgacaaaggagacaagggtgatactggccctgctgccagttataccgagggtacttacgctgcacgtccagcccctggtattgcaggtagtacctactacgctacggacattcgtgagacctatcgttccaatggaaccaactgggtacttgccagcactggtggtgttgtactcgcatcggttgctgttgaagcaagcggtctgtcaaatgctaatgagattccaatcaccagtcatgactttggcttgactccatttgcattggttccgaatgctccatcgctcatcttcacttgtgggcagcgtccatttattgtgacgctctcaggtacgatgcgtggtggtgaagccaatgcaacgtggtgcgtacagttggaaatcaacggtactgtctacacgcagcttctcgataaagacagcattgcagacaattggaaagcagtcgttcgttcgaccaaaccactgacgtttgctgtcggtactacgatcacctgtcgtattcgaggtgttgtgggcggaagcaccaatggtgctctgttcaccaacccagctgacccacttcagattgtggcgatgtccgtatgatcctgactcgatcagttctcaatgaagcactgcttgtggtgactcctacgttgccacagagtggtccacctgtcctcatggttcatggtgccgagggtgatcccaacggcgcctgggcgtggagtcagtacgacacacgcaccaaggtgccacgtggctgtctcgacgcagggcgtgtcatacacagccctgagttgggtggtaactacacctggggcaatgccacatgccaagcacgcatagatacagcctatgctcgcatgggcagccagaagatcgtggttgcctgtcagagcatgggtggtcctggtggcttgacttggactgcaaacaaccccactaaggtggcaggagtgatcctagtcattcctgtgctggacttagctagcattctgacaagcggttatgcatcagcattgaatgccgcctatagtggtggctacagtgatgcaacctacggggacttcagtcctgtcgttcgtgcacgtcgtggaacttttccagcagtaccaattcaactttggtatggaactactgactcactttgtttgcctcagtacgctgaagagttcggtgcactcaccggagcagagatgcatccacttgtgggtggacacgaagagagtgtagtgaacatggtcagtgcagctgaagtgacacgattcatcaaaaatctttgattcattttttctggtgtctaacaccaacaactggggagcgaatgctcccctttctacctctggagaacctgatggaaaagaaacatttttacgtgctctgtgctcaagtcgcttggcgtaccagcgaagattctgaagcactgagcgtgatgcctgtgaacgttgttgcatcgttcccatcgccatacattcgcaagttcaatctggcacaaatgaacgctcaggcaatcaacaacctgagccagatgatcggtgaacgtgtcaacccggatctcgtggccggtgtgaccatcatgaacatttcttctctgggctacatgaccgaagaagagttccatgctcaaccgactcagactcaggtcgagaaggaagttcgtactgtcgtgagtgaagcacaggatcagagcgagcgtgcctaatggcattcatccacgctactgaaatcttgcagatgagtgctgatactcttggtcagcgagcagctgatcgagatgtagttgaagaacggtcaatggctaaggtcgttgctctgttcaacatgaagcacgatctcaatctcaccgaagcacagggctggaacttcatggtcacactaaaggaagtccgctcactgatcggtgacacgttccgtccagatgattacatcgacaacatcagctacacagctcttgaagctgagtgtcgatctaagaagctgtaagcaaagtcgcagtcctttaccggggctgcggctctttttatttgacatagagccaacagtgaacaccatcaccaacagaacaggcatcccattgactcttgcagtctgggctgtccatgacgattacgacttcatctacgatgaaaactacatcagtgttaccacgctgatgaaacccattcgacagactgtactaggattccgaatcagtcctgaagagagacaacaacttgatgctgctgatctcatcagctcatcctggggatctgcccttcatggttctgtagagaacgcatggcgtaactatagaatcaatctgaagaaacttggctatcctcagtcagtgattgatcgtgtacgcatcaatccgaagccagaagaaattgcagcagaccctgacatcattgctatctacatggagcaacgtcgtagtcgtgttgtggctggttggactgtcggcggtaagttcgacttcgtaggcgaaggacaagtccaagacaacaagtctacaactgcctacacatggttctatggaaccaaggatgaggactacaagctccagctgagcatgtaccgcttcctcaacatggacatcatcactgaagaaaccggtcaagtgaacttcctgttcaccgactggaagaagtctgatgcccgatccaatccgaagtatccacagagtcgcttggaatcaaagacgattcctttgctctcaatcagtgagactgaaagctggataatcaatcgtctggctcagatcgacaagtaccgtgcaacacctgaaaaggaattgccacgctgtactgatgaagaattgtggcgctctgctccgcaatacaagtactactccgacccaactaaaacggacggacgttctaccaagaacttcgatacgctgcatgaagcgaatcagttctggaaggtagacaaagctggtaagggtattgtcaaaacaatcccaggccaagtgaagcgctgtgagtattgtggagtcttcaatctctgctcgcagaaagacgaatacttccccgaaggactaccaacatgatcgatctgtctgacgtacagcatcacatcacagtcgaagagattgtcgatgtcctgtgcaacaagactcaaaacactgaccgtggatttttccgtgcaaccgtcgtgttcttccttgcgaagatggcaagctgtcagcgtgccactgtcgttacgaaggatcgtggtgcattgcctgtcaacatgtacacccttgctctggccacttctggctacggtaaggggcactctgtaggcatcatggaaaacgagttgatgcaagcgttcaaagaacgtttcacactcgacaccatgccagtgatctctgagcaaacacattgggatctcgctaacaagcgagcactgcgtaatggcagtgatcccaatgatgaattcgaaaaggtcggcagcgacgctatgcgtagcggcaagatccctttcactttcgatagtggtaccgtcccagctgtaaagcagttgcgtcatgcattgctgctggcaggctgtggtgccatcaatcttcagatcgatgaaatcggatcgaacctgatcggcaatgttgagctgctcaatctgttcttggagctgtatgaccaaggcatcgtcaagggcaagctgaccaagaacactgcggagaacactcgcagcgaagagattgatggtaagacaccaaccaatctgttgctcttcggtacgcaaagcaagttgctcgatgcaggacaaactgaggatcagttttactcgttcctcgaaactggctatgcacgtcgttgcatcttcggcattggctctcaagatcgcaaggctttccatagccagagtcctgaagagatctaccgccgattgatccagccgaacaacaatgcgtcagtcaagaagtggtctcagcacttccacgcactggctgatccagcgatgttcggatggcagatgaacgtcgatgatgacgtgtccatcaagttgcttgagtacaagatcgcatgcgagaaggcagcagacttgatgcctgagcatgaagagatcaagaaagctgagctgtcccatcgttactttaaagcactgaagcttgcaggcacttacgccttcatcgagcaatccactactgtggagatgggacatcttctgtccgcaatcttgctggtcgaagaatcaggtttggcatttcaatcgatcttgaatcgaaagaaatcctacatgaagctggcagagtacattgccagtgttgaaggtgaagtcactcacgctgatctcaatgagcaactgccgttctataagacgggtgttggcttccgtaacgagatcatctcgatggctactgcctggggctacaagcaacacatcatcatcaagaagcgttttgaaaacaacattgaattcttcagtggtgaaaccctgaaggagacaaatcttgatgagatcatcctgtcgtatagcgatagctttgcctacaactacagtgctgaacgtgtgccatttgatcagctgcatttgctgactcaagagcaaggattgcattgggcaaaccatcacttccgtgggaaccaccgagcagaagagaatgtggtacctgagttcaactgcatcgtcatcgatgtggacgaaggaacttcgctagtctcagctcatgagttgatgaaggaatatcgtttcatgacttacaccaccaagcgtcatcaagtggatggtcatgcagatcgattcaggatgatcattccgatcaactaccatctgaagttggaagcggatgactacaaggaattcatgaataacatcatgaaggctttgccatttacttctgacgaggctgcaaatcaacgagccaagaagtgggagacgttcgctggtggtgagtatcactacaacgacggtgtgatcttcgatgcactgaagttcattccaaagacttcgaagaacgagcagcatcaagcagagttcaagaagatcgagaacctcgacaaccttcagcgttggttcgctgcacggatcaatgagacgggcaaccgtaacaacaatctgctgcgttatgcgatgactctcgtagacaatggcctgccactgattgatgtacagaaccttgtgatctccttcaatcaaatgctggaagcaccgctcgatgattctgagattcgttctacgattctggtatcagtcggtaagaagtaccaacggagctaaccatggaacttactcagttcgaggaaaatgtaatcgtaatgcttcgtaagatggagcagaataatgaaacacctcaccgtcgtgtaatcctgattgactgtcagtcaagacaaccgctcattgaaattccttatgatgatcgtgggttcatttccaccagtgagccagttcagtcagaacagatcagtaacatgatggaatctgtcatgcgatcaagtgatgaaattattttgtctatgcgtaatacacaagcagaggcagaagaaaatatacagacgggaaagatctacgagtacatggtccacttcgttagtagttgattacctatgagtggatgacagttcttttgctggttccaagactgtcatccaactctgaaccaaggagcagagtagtgagtgaagaagaacaaatcgaggaagtgatcaatgatcagcttgtactgatcagtggtcaatccgctaccggtaagtccgcatcactgcggaacatccggaaccaagaacgctggctgtatctcggtaccgaggcaggcaagcgtctcccattccgcaacaagttctgggccgaacggatcaccgatccgatggacgtactgaactacatggaacagtgcatcgagaatcgtgacgccattgatggtgtgattctggactcgctgacattcctgatggatatgtacgaaacccagtacgtcatcaatgcagccaacaccatggcagcatggggtgcctatcagcagttcttcaagcagctgatgaatgctgttgctcggtttggtaagccagtgatcatcatcgcccacacgcttgacgtgtacgatgaatctgcaatggcaaccaagaccagcgtacccatcaagggtgctctgaagaacaatggtatcgaggcttacttctcgaccgtagtcagcaccaagaaggtgactgtcaaggaaatcgagaagcttaaaagcagcctgctggaaatcacggaagaagaacgcgaacttggattcaagtacgtgttccagactcgcatcaccgcgaagaccacaggcgaacggattcgttctccgatggggatgttcgacaagtctcagacctacatcgacaacgatgctcaggctttgctcgactatctccacaagttctacaatagctaacacagcgttgtagttgattagcaacacatctcaataagcaaaggaaaaatcatgtttcagaatttgaccaacgaaggtatggagcagcaggaagatcgtctgggtggtggcggtccgctgccgactggcgtctacaccggcacaatcaagcagttctatggcatcaagtctgatgccggtgccatgggtgtcgttttcatcctggacattgatgggcgtgagtaccgcgaaaacatctacgtcaccaatcgtaagggtgaaaacttctacaccagggacggcaagaagtatcagctgcccggcttcatcactgcgaacgacatcgctctctgcgccaacggtcagcagctcaatgagctggagtgggaagaaaagcaggtcaagcagtggtctgatggcaaggaagtgctgaaggctgcacaggttgctgttgatctgctgggcaagacggtcactgtcgctatcgtcaacaccctgaagaacaagcaggaaaagaacagcaaggatgactacgttgacgttgctggtgagcgtgccgagaaccacatcgagaaagtgttcgactctgagtcgaagcgtaccgttcgtgaagcaatcgacggcaaggaagaagctgcattccacgacgagtggttgaagaagaacgaaggcgtgcagcgtgacaagcgcagcatcaaggatggtggctcggcaggttctgctggtgcacctccgaaggctggtgctgcatcgtctgctccgacaacgagcggcaagtcactgttcaacaagaagtgatgaaaatcccagtgctaggcatggaccccagtttgcgtaactggggattggcagcagccgaattgtgtctggacactgggaatctttctacacctgtcatcagcattgttggtacgaagtctgatgacagtaagcgagtccgccagaactccaaggacttgcagaccgctgaagatctcgcagcaggtatcttgcctgctgcaaggttagctaaagcgatcttcgtagaagttccagtgggatcgcaatccgccagagcaatggcttcgtacggaacgtgtgtaggcattcttggttccatacgagcacttggtatcgagatcattgaagtgacgccgaccgaagtgaagacccacttcaccggtaataagaacgctaccaaagacgatatgatccgcacggccatggagtactaccccgaagcagcatggccgctcctgaaaggtaaagtggtagcgaaggctgagcacatggctgatgccattgcggcaattcacgcaggcgtacacacacctgtgtttcaacaattgatgcgacttctcgcatcctaatctcaaggaaataacatggcactggaaattaccatcgatcagaatgagatcgaaactgcaatccgcaatcacatcggtaccctgatcaccgtggctgaaggccagaacatcagcatcgccctgaaggctggccgtggtgaaaacggctactcggctaccatcgagatcggtggttcgaatgcaactgcatcggttgaaacgaagccggctgctgccccatctgtctcgggtccgttcaagcgtggagccaagccggctcagaccgacaccagcgctcctgtgggcgatgctccgatcccggagcaggatctgacccagaaggaagttgccgtcgctgataccggcgtacagacctctccggagcctgtcgatgtcaccccggctgaagagccggttgccgaaacgccgaagaagggtggcttgttccagcatctgccgaagcgtaccggtacggacactgaagccaactaatcggcctcaaccgtaaagtagaaagcccctcaatgaggggctttctttttggtcagttcaccagattgatccaaggattcaacagtggtgcccggaaggcttggcctaccccgacagagtagtccagggagccgtctgcaagcttcgcaaagaggttgtcctcgataggtagcccaacactaccaaacatcgtcggagccggtgcagcgacagccaggagcgaatgcagggggttattcctgatcatgctcagacccaccttggccgaacgtatcttgaagttccagaaccagagaagaccaatggattccaagtagcctcggaaccgacccggcagacggtcgtagttaacgaactcttccgtaatccggctcagggcgtactctggcgacttcttctgacgacgagtgatgtcgtcatagaggatcgccttagccacgaagtcaccgtactggatggctttctgcaagccttggtacagagccgtgtctttggtgatcaaggcatagcgaccagcagtgcgaacactctcaggcagacgatcaaccatcttctcgatgtaggcattgagcttgccagaggtcagttcgatatcgtcagcagtcatacccacatcagagatcgcagtgaactcgcctgcttctatcaatggccagatcgacaaacgacggtgagcatctcgaattgaacgcaactcagcattcaacttacgagtacccacgatatcgttgttggcttcagccacacgcaactcaccttcaacttcatccatacgaacacgagacttgacatagctgtcgatctcggctgccttctgaggatagccacgagcaacactcagcaatggcacaccacgaccaaccaactgatacacgttggcaatcgagttagagatcggaacaaccaccgacttcaccacgatgatcgtacgagcatcttggacaaagttctgaagcacacgttctgcattggtcacatacctataggctttgttaccaaacagaccaagtgccaacttcttcgcagtgtcagtagtctcacgagaccagcgagtattaccagtgaacacgtcaccagtcgatgccgaacgatagccgatagcatcgttgagcatgtccttacgaacgtagaactcttcaccaaacttcgacttgatgtacttacgggtctcagcactgaacagacttgctgcatcagcaattaccttgtcagtcctcttgtcgaacagatccacatacatctcttgtgcagtgctcgacgccttcgtgtcggattcgtacatgtcatgcagtgcatcaaccagacgctcattgaagaattgagccttcgcctcttcaacctgacgaccacgccagacaccaatcatcttggcgaagtgatcgtccttgttgagacgctgcatctgttgtggatcaactgcacgctcataggctacagcattacccttctcatcccagatcggcatcaaaggttcgctctgactggttgtattacgctgaccataggcagcagcagtacgactgatcaatgcaacttctgcacgctcagtgatacgaccagcaaccatggtgtcgtggctgaacccggtcacagcatccacaccgttagaggtgtgacgaacattttggaagatgccctggttgtaagcagcacgcccagacacgggtgcgtagtagtagcccttcttggatcggccacgctcaaggtaatcacccttgtagtcagcaacacgaacgtagctacgctcagccaacttggcaaactctttgtcctcagcaaccaacaggctgacacccggctgatcaagcgtagggatgtatcccttgaattggttgtactgagcacggttggtctgtgccttcgtgtactcatccttacgctgaccacgcaggtaagacacagcaaattccataccctcagcttcattggtgatcaggttagccagatcactgcgaaccatgggggtaagtgactccaccgcgtacagagaagtcagctgatcaattgcatcaacgacatcttggccaggaatcttccagctaccacgacgactctcattgaacagacgtgagatggccaatgcattacgcagcaagttgttacctgcttcacccgtcatcatgtagttggccaactgctgcatcttcttctgatacgtatcgaagttgatcggcgagtgattacgcacagtgtcttccaacgcagtgatgcgttgtgcacggtagttgtcatcagctactgcttgcagtgcatcggaatccaatgcagccaagtccgtcttaccaagaccacgatgcagcatagaccactggtccttggtcagctcacgcttgaacttgccggcaatgatgcccggcagatgttcgcggaattgctgacgatcctgttgaaccatggcacgaacagtcttgatcatgtcgtagatggtcgagttgttgtcagtacgaccaaccagatcattgaacagatcttgcagtggcttccagagattcgaacgattcgacatctccatgaagcccatagctacctgagcaccattcttctcagttgccatcttggccatgatctgagcagcaccagccagcatacgaccagccttggtgttagcacgttgctcagcctcagtcgccttgacgattgcagcttcgctcaacttctcaacaccatcaacgatgtactgattggcacgatcaaacacaccgccagtcttggaagcgtattgatccatggcactttgtgtgtcctgcatcgtgtcgtacatgtggctcatcagagcatccatagctccaccaatgtcacgagagttgctggtaccagacagataaccactcagcctatccattgcagtctggccggcattctccaacatgccatccaaagtacgaccatcagcacgatcagcctttggcaatgccatacgactcaatgcacgacgcagagtgtcattggtcatcgacaatgcaacgaacacaggcagcagtgaactacgaccctttgcatcagttgtggtcagatagttacccatgatgacgttgtactgctcctgcgcatagtaacgagcagactgaggatcaacaggattctcaggcatcaggtcatcaacggtcagcgtcttggtgacatgcgagaacagctgctgtgccttagccaaagcgttggcatccagatcaatgctcatcgtcatggcagtcgtcaggtgacggaacagtgcagcttcctgcatggtcattgggaacccatgagcattgaccatagcagtcagtgcgcttgagttacgcaatgcattcagtagttctttgcgccgactctcaccagtgtgtgggtcaacccgcacacgaacatagtcagcaactttacgcatgaaagtttgctgcaaagcagtcagacgatcgttgttgccaaacaatggattctggaacagagccgtatcacgaacgccatcagcaatcgttgggaacgaacgaatgatgacaccagtgttgaactgaagagtgctcaatgcatcgtcagcaattgctggtgctttctttttatcccagaacaattgcttcaggaacttgacaacatccttggccatttgaaccaaggagggtgattgcttcgacttgaggttctcagtcagctgttcattggtcagtgcccaagccatgaactcattgagtgccttagccttggccacagcatcagtgacatcgagatcagactgggcttcagtgatgacagcttgtgcagtagtcacagcaacgttgttgctcgtgtcctgcatgaactgatccatcaaaccttcgattcgagtaatagcatcagccacttccggagacgaattgccttcgtagtgagcaagcaccttctcgaaagtagtagcgtgcacctgctcatggatcaacgtttcaaccgaagcgttgtagagatagatggtcttgtcagcaacgacagttgcacccagcttgtcctgcggagtgatgatcttgcctgttgcattctggtagtcagcaatctgctcggcagtaccgaacacgacttgccagtccttcatggactgagaacgctggatttctccgaagatgaccttctgtgcatcagtcatctcagccatgcgaccaaggttctgtagtgccgtgtaggacagcacacgtgcaccagacttgtgagcacgacccacttgatccaagggagctgatacagcagccggtgccttcggagtgacagtgatcacaccacgcttatctcgtgcagccttatacgctgcctgcaatgcagccaatgggtcatcgaccggagcaataccattgctgtagggagcaccagcagcagccatctggtcaactgaattggccacagcctgacgtgcagcgattcgatcagcagcagattcagcagaccacttgagattcagacccaagtcttccatcgctgcttcaacagcagagggagtgcgaacttcgttacgctcaagtggaatacccaaagcacgatacagatcggccagcatctcttcggacacattctccatcgacacgttcttagagaacttgacccatgagtcattgacagcagccagaggattaccctgccagctctggtatacagcctcattggctcgacggctgtaatccatcagacgactatccagtgcgatgttcataccatcgaacactttcagagttcccttgagtttggcattggccaagtactgcatcatgcgaccatcgcctgagccaatggtcatgaaagcagcaccggcaacaccagcattcgctgggccatagatataggcatcagtgctcatgcggctggccttactcagaccacgaccaaactctgacgcaccaacatcagtcttgctggatgcagcaatgtagaaacgctgtgcaccggtatcgatcagtggagccagagtctccaacttcttgtagataccacgcagctcagcttgactcaggaactcagtcttcttgtagttcggatcagcagcagctttgctttcaatggcagcagcaacttcacgcttgaatgcatcttccaggaagatcgactggacctgagtagcacgacgaaggatctcaacagccttcatcatcggtgcaccaacagtcgcagtgatgccttctcgcatcggagcaacaaacagatgcagcatgttctgctgaatgttcttgatctgatcagagttgaattggaactcaacaggataagccatatcgacacgcttcgtcggagcgtcatcccacttgattccgttcttggttcgaacaggaaccacagaagttagctcatccatagcagcatagaacgtatccaacttctgctgtgcattgacatcattcacaccgaacatggcctgagccatggagatggaactatcagccttctgcatcgtggcaacagtagacagtcgctcatagatcttcttgatcagcgactgagtgacattgcctgcaataccattcgcaccagaaccatagatggtaatggtgagtggattcttcagtgcaccgcgacccagagtcagtacaccagtctcgttgtcgaaagtgatgtcattaccaaagaacgcatccagcacagtaaacagtcggttgatctgatcagtaccgtactgatcatcagccagttccttacgcagtgagtccacagccttggctgtctcatccgtagacgcttgatagagatccttcgaatcaatgctagaacggatctcattagcagtcgttggtgcaccaaaggtgacaccacccttacgcatgttgttgacccactgctcactgaagtcaccaatcgtcatcaagcccatggcattgatcggaccattggtcataccgtctgcttccagatacaacgaagtggtgaactcgccacgattgctgtcatcaagacgagcgtactcactcagagaatgcaaagcagccggagtcatatctgcaccaacagccttaaaggtgttgagcagagtatctacgtcagtctcgttaacgatgtggctacctgagttcaacgactgaagcaggctgattgcatcacccatcgaagcaagcatgccttcgatctttgcaatggcagcaggccgctccatgttatggaccttgacaccaaagtgctgaccaacagcaacaatgaagttgccatactgatcggggtcattgagattcaatgtggcacgagtaggcaggattgcctcacgaacaaccttgctcgattgcgggctgtacttacccagcatctgcatacgaccaacacgggacatgttgtaacggtaacgcacaggcatgtcagtgacatctcgcccagcagcctgagcaaggttgttcacttcgccatacacacgagccagggaattcatggcagcagtgatcgtacggttcttaccctcaaggctggctgcatgtgccttgtttagaacctgaccaccgacattgcctgcaccgaacagacgctgcaatgcacccatacccagaccggtatagacattgatcatcgtctggttgacatagaacggagttttctgttcttcacgcaaagcagattgctgatcctcagtgttttcaaccagaggattgttcatctgtcgcttggcgacttccatctttacatcgtcaccaatgaagttgacttcctctggttcaaccataaccgcatgctcaattgcattcgggtagtcattgattccagttgggatagcatcttcagcgacaacgtagcgattgaaagtctgcttgtgatcaagtccgtgacgctcatccaaagttacgttgacaacattcaacagcttgttgtccaccattgcctggatgacttcagcagccatcgactcaggaatgccttccacataacccagtggtgcattgctgttagcagtcaatccccaataggacttgatcttctgagccagcgttcgcttagcctcagcagtactcatgccctggttcagttcttcgatcagatcactgtcaccaagagcatccatgttcaagccggtataagcctggaagtcttcagccgtcatgtcttgcgtatagacatcaccgttaatcagccaatgcagacctgcaagcactgcgttctcaaccaagttttggttgtacgtcagcttgccatctacgttgtcagtgatgttgatcagcttaccgtcaagccaagtgttgacatcagactgaccgctcaggaaacgaccaccaacgttcttctcagagaggaaagtttgcagttgcttatccagactcttcttgatccagttcgcttcggaaaacagagtacggtagccgtcgatgacgtctacggtcacatcgtgacgcacagcgtcacccacatgccgaatgaagttctgcccagaggacagtgcttcttgaaccatggagagaggtgactcactgccgagggtgtgagtacgtgcctcatcaggcagcgagtaggcttccttgaatcgattcggatacttgtcggtctgcaccaagttggggaatacagcttccataccttgtggtgcaggctcagcttcagcagtctcaaccacatccggaaccgtctcttcagctacggtttcggtagctggctggggagcagaactaggctccacaacggcttccggttggtcaataacagtctcttcactggaccttgattcttccatgacaggttcagtttcagctgaggtatcatcttcctgcacctgcgttgcaggttcctcggtaggggccgagtccaccacgcgtgagttacgtcggaacgagtccgctacctcttggatcggaccttccagacgcgaatccaaggagaccgcaccaacatgaccaccattcaagttcgggaacgaatcgctcaggccgttgtaaacgttggccaacacttgggcctcaagcgcaatctggtgcgcttgctcaagggatttcgtggagcgagtgttaacgtacagcccttttgcggactgcttccacgtccggtcaggttgaagtgccatgtaggtgacaccatcagcgttcggattccccgcagcaaagtgagcgttgagcgccccgaccttgttctgcatatgctgcacgaactcgctaaagtcggtcagaagggcagcagcgaggttgagattacccgcagccacggccgaacgaatgcccttgtagtgcaccagggctgacttctcaccatcacccgtacgcatcgtatccgtggtgatttgctttgcaacaagatcctgacgacgcttcagacccagacgatccacagcttcattgtatgcacgttgttcttgcaagatcgtcttactgaaggtcaacgcagctcgctgatcaggagtcaacaccaaacgtccttgggactcttggtagaggatctgatcagcagtgttcggatcaagcttctggggtgcattctctgcaaccaccaaagcttcattgaccgcctgcttgccggcaggagtttccacattctcatcggtcacttgcggagcaatagaaccatcttcagctgcctgcatcttctgcatgacagtggtcagagcacgattgatcttcggcgtatcaagattcgccaacagtcctgcatactggttcagcagttgagcaggacgactctccggatcaagtccatccaagccagcagactcacgcatcttgaagtcctgtacggactgagccatgcgcagtagtgcgtaaccagcttcgatagagtccggcgtatcttccttcactcggttgacgaactcagccaagttctgcattgcctcaacacgattgccagcattgagaatcagtgggcgaatgttctcaccataaccaacttcatcgacttcagccgggttaaccgtcagctgattcatcagagtatctacgtaagagacagcattagctttctcttctggtgcaatgtcttgtgcatcaatagctgcacggatctcttcagcagccataggtgcttgagccacagcttcagcagcagcattgcctacaacagagtcagccaatgggctgctcttttcattttcagcaatgatgcgattgccacgttcaataagactattgaagactggggacaccacagccttcagaccttgcatcgtgccattcgctgccttgagtgcaacacgaccacttgcacctggaagctggacagtgccagcagcactgaagccatagagtgcaccttgaccaacctgctcaccaacaccttcagagagttgttgatccgggttgacgttctgttggatggcatagttctgagccagcccaccagtaccagactggataccttcttccagcggctcacgtaccaaagcgttagccaaggcagtacgcaggttcggcacatggaatgggttggactcgaaccgagcaaccaaggcaccagtagcagcagcaatcggagcctggatggcagcagcctgacgaccagcactatttgccagctggatacgtgcatcctcttggctcacgccagaggcgaccaattcacggaactgggggctagtacggttgagttcgtcaaacgactgctccatgacagcgttcgtcgtctgctggtaagcaccaccagcttccatagctgcaatggcagcaggagtggatacagcagaacctacacgctcagcaacagcggcagtagtagccagagacgcaccagaggctcgaccaatcgcctgagcgatgggagcaccaatagcacgtagacccttgctgattggaccagcacccaacagagaacccacagcatcagacgtaccctgcataaaggtcgtctcatctgagaggccgttgaccacagtattgactgcatctcgaccaatctgccggagtgctgctggaagctcccccatggactcacgttcgctttcgaactgtgcctgggagtctcggttctccaaagccgtgacggcctgtgtggagcgcctacgagcgttcagcacatcagtctgagtgccttgcacgaactcgttagcatcttgaatcttcccagatgcccaagcaccagcatcatcactgacagcaccgagtgccatagcaccaatgccagcaaaggcattgcccaagccggaaccaacaccagagatgatgtcagccgatgcctgtgacagattgcggttgttcagtgattggtctcgttggaaggcagcattgcctgccccctgagccaagatgagattggtagcattgctgccgtacttcgcatagatatccgaaggcagcatggtgcgaagatctgcttccaattcactcatcgtagctgcaccagactggttgccctgtccagcagctacttggtagaaatcgacgctgttcatgtcaggcgtcgcaggagcagcgacttgcgccggggctggcagcacagggtcactattgaccggggtgctcagagccgaacgcagaatgtcggtgatcgccatcttggttggagtccttgttagaggtaagttggtagagactacaataacagaaaaccccgccggagcggggtcttccttgttgcagtttacggtgcaccgaccggaatgaacatgtcttcattcgcctgggcttgtcggagaatctccgttgcccgattgaatgaaccccctcggctttctgctaccggctcaggctgcgtccgttggaagtcaggacgcagctgcggcagtgctcgctgcgcttcctggatagagtcaagttgctgacgagcagcttgaacacgagcctgatagcgaggcagctgagcacgaagccccggctgagttgcagcacgttgagtcattgcagacagctgtgacactgcatcgttgtaggtagcctgagcagattgcaatcgagcagcaaccgctcccgtttcctgattggaaacgaagttagtgaattgactgccgttacgcagactttcaatagcagcatcgatcccatcatcgttcaggcgtacaccgttaccgagatttgggctggaccgaatcggtgatagcaaacggttaactccgtactgcaagtactcagatgcagacccaggagcgttagtgatgtttcgacgaagtacagcaccagcagttgcagcattgacgttaccctgagacatcacacgctgaatttctcgcatgatgtcgccacggttcgaaccagagaacgaaccactctcaccgatcagttcatcaactacctgaccagcatcgcggttatctgcaacagttgtgccaaagtcattgctgatgccagtagcattgttctgcattgctcgcgtcaaaacttcggcagtaccagcattcgtctgcaacgcttcattggcacgaccgccaactgcttgaccaacttcagcttgtgaaatgcgttgacgcatttcatcccacgacaagtctttgtaagcacccggcttggagtcaggaagtgcagcccaagtatctttgaggttgccattcttgcgtgcatcgaagattgccttgccgatcttgtcctgattctcaggcgtgaacggctgactcttccaatccgcacccagcaccttcggaccgaagtcttcaagcgtgcccttgttgatttggaatgcacccaatgggctatgaccctgacgactgatcattccagcttggtgttggattacatcaccaatcgccatctgcgtgatcggacgtggcgttgcctggaattcaaacgtcgtgtcgtacgcactaccttgacgagtaccagcagtacccggagcagacacacttgcaccaccagcagaaggaccagctaccgctgcgcctgaaccaaggggaccatacgtaccggggaatgctgactgtacaaggcgagttgcttgagcacgaatgttcggatcaaggttcgccatgctttccagagttgcacgtgcatcttctgcacccgcagacatacgcagtacgttgttggcaacgacctgtgcttctcgggattcagtgtcattacgttgatcaataccaaggttgtactgatcacgcttcagaccaaactcaccggtgcgctgaccaagttcacctcgggtaagaccctgagtgttctgtgccaatgccatcgattgctcaggattgaggttgcgcagcagaggtccatagacatcctgtagctgcgtaacttcagcctgattaccacgacgtgctgcatcagtgatgcgattgattgcttcacgagcagcatcagtgcgggtattcgaatccacagtacggttgaagccatactggtcttgttccagattgaatgcaccctgttgcaatgcttggcgagtacggtcttggttcaaacgagaaccaacttgatcctgcaaaccagtaagcacaccagcagacaaacggttcgggttgataccttgcagcaacgaaccatcagccagtgcaccactcagcccagcagcatcttgctgacgtagtgcacgcatcaatacttcttgatcagcagctttagtctgctgactgcgaagcatatcgatggtgttgttggctgcgccaaatgcgttgttcaactggtcattgaacaactgtagcccacgcattgagctactgaagtccggaccttcgataggacgatattgaagagtagccatctgtattccttacccgcgagtcagacgattctgctcgacgtactgatcacgttctgcatcagactgaccttcaacaacagcacgagagcgagcacgatcagccagtgcagtgttgtaagtctgcatcgagttgttgaggttcgtattagcgaaactcttggtgaagttaaattgatccttagccagcttgttagcctggaatgcaccccacaaaccaccaagggtttgaagaccacccagaccaagcttaagggtatccatattccaaccaagacctgaatcgcctgcaccactttggggaggaacaaagccagcaccgttggctccgtagttggttgctggcaattccgccatgccagttggacgacccagaccatacgagcctgagaagatgtccgtaccacctgtgatggagttggtaccaaagttcagattagccagtgccgggtagctggactgccaatcttgtagagtcgttgccattggcgttgcctttacgtttgaagatttgtcgaaagagtcaggtctgcaaagttgcccagcatgtccaaactgagacctgagatgtcactacctaccatcagagtccgctcaaggaacgatgacggactttcagggatatagcctcgtactgcttcagtcaaggagagggggtcaatcacacccttgttcaccccgaaagcgtcggcataagcctgagcaatcgcctcagattctaccttataaccctcgacgatcttctgagtctctagcaggatatcttgggtagaggcgttcacatagttcgtgtaggcgttcagaccggtattggtcagtgccaacaggttctctgcccgcatcatgttggcaaacccagctgccatggactggccactggccatggcactaccaacgtttaagactacgaacgaggcaatcacacctacgatggcaccaatcttgtcaccgaacagagcagttgcagctcgctgaatgatcgataccagaatcatggcagcaatggcattgatcacagcgcccaccacaagggctgctacacctgtcagaccgacagctgcacctaccgcagcacttgaaccaaggatgccagcagcgcctgcgccagcaccacctgtgtagattgtgatgatgatgatcacaatgatcaggatcaccttgaacaagccagtctgataccacttcttcttcactacctgatagcagttgaagacaatgaagctacatgcagtagccatctgagtagacttcaccagaggcattgcacggtagataccttcatgcagtggcacgatgaaacctgattcgtcagtgtcagccaatgcatcagcagcatcgatctcaacagccttgcccttgtagatttcattgcgatgcatcagaccacggatgttcatcactcgatacgagttgttctcatcctgccaatagaggttgatgtcattgacggagatgttgtcgagaatcccccagatgccaccaacaaaacccagctcatcaaatagctcattcacccctcgactgaaccacaagtctcccttcttggctcccggcctaccaagaccattgtgctcagtctcaatgatcgagttccagctaatcgtgatgttgtagttcatcacgttgtttttgtcagaacggatcttgatttcgttcgtaggcattggaggatacggctgttgagccggttccggagtgccatacagaggattgctcgaatcagactgagcagctttccatgcagcccactgttgcatagttgcatcagctgctacccaggcaagcttccatgcagtgtaatcaccatcagtaccaacactggcagattcaagaatgcccttaaagaacctgtagacgtactcacggcaagcaacttctttgacgttgagtgacacaccgaacacggtgtaagcgtagtcgatgtctttcaggttctcgttgtccttgatcttttcgatcaagtcatcgtacttaccagtcgtactcttcttcagtgctttcttggattgtgcatagacatcaggcaagttcgtcggcgagacaaactcattgttgatacgaaatggaatgaagggaaagaattgctgatcaccggtgcgtggattgaacatggcatccagtgcagcattgcctgaaccacgacggtaaatgaaaacttgagcatcactccaactggactgaatagtctcttgagtatcaatacggtaagaccgttcaacaccaagattctcaacagtagttgtcgtcttagtagtcttggtaacaccaccaccaatgtcttcatcaacagacacgacagatacagactcagtgacatcacgagtctgatcttgatacatcgtcgattcaacagagtaggttgaatctgacccaggcttagtgcctttgaactcatccttcatgtagacacgatggatctcttgatacgtctcagtgcgagtcgtacttgattccgtgtgctcagcaggacgaccatcagagtaggtcacatccttttcaacatccgtcttcagatccacatcagtattgaccactgaattcgtgatcgattcccaaccatcgacagacgggtatggttgaccttgagccaggacgactgtatcgccaggaacaagtggttgctgttctggatcgtttgccaacaagtatgtggcatacaaataccgactcgtgtcaacgaagtcagcagcaacgaaggtataggtcacaacatcattgaagagaatacgaatcgtctgaccttcaatgtcagcagtccaatcttcattaattcgatcaggatgattttccagcatccagcgatcagcccagaaggtgtaatcagcatcaccaatcttgaccgattgaacttgaacctgctggttcgctgcatgaggcaattcgttctttagaacgttgacatctacagagttacctacagaaatactgccggtcacaagaccgacagtatccgtataaccagtacgacgagaccaacgagcaaagctacggaagcgaattgcaggaccattgagataactgtttgtgatcgtctgtccaagacttgtaacattgttcaagatcccaccaaagacagttgtcttcagataggacggacgctcattttcatcgccagccatgttgtagatgactgaactaacgtaggtcttctttcgacttccgaacatgcccattagacaaatccattctcagtcatgatcttgtccaacaccttatcgagattggcattggtgaaaccatcaggtggagtcaaaccttcatcaatggtcttcatggcaatccatgcatcaatgaacggacgacctgccttgacttcagcatctcgcttgtaactggtgatctgctgtgagtacagctcacgctgcttaccgacagaacctgcaaccgcagagccatcggtacgagtatcgagcgtctgtgcacgctgtgcttcaccttgttctttcaccatcagccactgtgccggcaagatgttgcccagattgtagacagccgtaccgtaagcctgatcttcagttgccagcttcatggtggtcagtgcatacgttgcaccagaagtctgtgcatccagaacaaccttggcgtactcagccttagccgtttgcgtttgaaccagagcagcaaatgcttgcagctgagcaacttgtgcctgccagaaagcttgatccttctgaagcaggaattgcgttgcattctgcatcacactctcaacgagtgaaatgtaagccttggtgtagtcaccagcagtaatacgacctgcctgatactccatcagcaagtgttgcttggcactcgacatcagcttgtcgaatacaccttcaccagtcggacaaccatctgacagatctttcagtgcgactgaaggaatatttttgaatagcggactgtcagcatcgacaggtagcttccaaatatcgtcattccaatcgatatcaggcaactggatattcagatcttggatgagataagtgaggatgctcttggcatcctgttcgccgttttgacgtgccatgtcttgatccacgtagaaagaaaaaagcccactgaaccaagaaggtcagtgggcctagtttactggcttccagtcagcttagccgacttccgaagtaccagctgcaagctgagcagtggccagctgcttgagttctgccggagtcagatcaggcagatcttcgatgccgaattcggttgcaagacgagtagtgacgatcacctgaccggtacccttgatcgtcttggttcggatgtccacgtacttgcgggctttcatctgatcatagatggcctgctcaatatgccaaccattgtcggtggtctcaccgaatgggacataccgcttgatcgcacccatgaagttgttgcctacagtgaagaactcaccgggcagatctcgcttgttcgggttgtggcaggtaatacggacacgacgcagcttggttgcctttgcacgtagatacgagtgcagggacacaggcttggcgggtgtaccttcagacgaagtttcagtgcccggcattggctgagcaaccttgtcagtaggtgctgcattgcctgacatggcagattgcagctgagcacgcagagtctcaagactggcgttgttggatggggtctgacccatcgtctttaggcgtgcacgcaacactgccttctcttcattgtcacgctgttccggagtcatatcctgcgggtccagcgattcggtgttctgttgttcgctcatggctgctacgttctcttgatgaaattgaagatggggagatcactctccccatcttggttccgctaccgattagatcggagcaacggtcttgatcagacccagacgttctgggcgcttgatcaggataccgtagtaccacttgatcgagctgaaaccagtctcgccatacggatcgttacggtccgcagtctccttaccaggagccttggtgatgaccgagaacttcacggtcttgccatcggtctggaagccgatggtggtgaacgcatcatcgccgacaaccagcatcgggaagatgtcgtagcgttcctcaccagcactgttcgtgctcgaacggtagccaggattggtaccaacttcggcacccttcgcagcccagtgcagcatctccggaacctgcacgatacggaacgcatcgatggtaccgatttcgccgttcatgatggtgccagcagaagcatagtgctggatctcaacgaacgccttgttaccgaacaggtcggtcatgcccttcagcagcggagccagttccgaacccacgtagatcactcgggtagcacccagggtcttcgtgtcgatcagacgggaaccggtgatgatggtggtctgcgtcggagtacgcagatcggtcagcgtctgatccagacgcatcagcagacggtagtccaccaacgaagccggaatctcaggcacagcaccagcagcaggaacaacttcaccggtgacttcgccatcattggttgcagcaccagcgtagaacacggtaccagccatcgacagcagatcggtctgaagcacagcttcggtcagctggacagcaccgttcatcagctcacggctcaaatgatccttcagctcgtcatccgagtcgaagtccacagattcctgggtccactcgtagaagaagccgaacttgtgcaggctgccttcacgttccagacgggtgaagccaacgcggttcactcgaccaccgttctcggtcagagtcggcagcttcgaagtgatcacaccgatgtccttcgacgaaccatataggttgccgttggcaatggtgacaccgtttgcgtcgataccctgatcgttgatgttgcgatcatccagcaacggaacgtagtaatagaccttgatcttcttgccgtagttcttcggcatgttggtgacgttggccagcggcatgaagtactgatcacgacgtgactcgatgatcgacttcttgagccacatgaaggtgttcatctggtcggaaccagcaccgtcgatgctcgacttgtcgccctcggcgggggcattgtaattcagaggcatgatcttcagatctcgttacacgcggcctgccatctgacgtaggaagtcgtcgtcggacatggccagaggattgatgggagaagcagcagcttttgctggcgtactgcgggttacagccgcagcttgagccttgtccgatacagtttgctttgcaggttgagcaacagtcttggcgacaggtgccggtgcttgcttgaccggttggtgggcaaccgtagtctttgcagcttcggcctgagccaattcgttacccacttcccggtaagcaagcaagaacggagtagacacaggaatgacaccgagagtacgacgacgattcacttcattggcaataacgtcatagacgccactgacacgatgttcgtggatggtacgcagcacagcaggttcattcccaaccgcatcgatactggcttgatcccacttcagagcctctgcaatggtttcttttcctcgatccattgattgaagttcatcaaccgtggattggaaatctacctgccgatcactgacgcgatgattgccaccttgatacgtcgattctgcatcaacatcgatgtctcgcggatcgatgccagaatcctttaacagcttctggattgctgccttgtcacctttactgaggtcaatcagaaaggacaactggctttcatccgtcagcttatggttttgcagcatggccagaacacgacgatgcggagcgagttcctgcatcttccgggtgtagttagcacccatctgcatcagctgctttacttcttcaggacttttcagttcgactttgcgcccattcgcagtgaatggcgccataagcttttcatactcagccttgtaatccgggggagtctcggtagtaccagccccctcagcaacctcaccagtaccggaactaccggtagcgtcaggattgctgttggcctgagtgccctcttccttgaccggaggggtagtctcagaaccagggggaggaacagtgccgtctcccgtatcggacggcgtgacattaccaccttccggtgtgccatcgccagtgttcgtattctctacaacttgttgagtttcttcaacaactaccggatcagttacttcttcggtggtctgggcaccagcatcttcctgagtggcaacctgctcttgcatcagagcaggcacccctttattcaggaattcttcgtcagacaattccagaatgcccggcatgggaattaatcctcaatgctctgggcatcgtcttcctggcgagaaagctcaatggcttcttccagttggtcgatgttgttgatctcgttcgtgagcatgcgttcctgagcgaggatatacatctcgataccaccagttgcttgtgccatcttcaggtacttggcctgttcatccagactctggccaggatggatgctcatctgaaccagacgggcacactcattcttggcatagtccgtgaggatcagttccttgaaatcccggttctgacagaggcgttggagcttttccagcttgagcttggcctctttggccgaattcaactgccggacgagggcttcggttgtgacttcagtctgcatgactaattggtctcgttggtggttttgtaatgggacgatgagccgaggaccggctcaccttccacaataatagatctatgttgttatacctgtccactacgggatagggcattgaacccaatcgccgcttcgacatcaccttctcgttctccctccttccttttttcgaggagagccttggtgatttgcagatcttggttcccttcagcctgactctgctgactttgcattttctcaatgtgcttggtcccgttggcttccttgactgtatccacctgggtggcctgggcatcagcaacagctttctgggtttgagccttgacaagatcaatccgggcctggatctcctgaatctccatctgagctttctgctgttccagttcctgcatcggattcggttggggctggtaatcctcaatagccttggccagatccggcatacgcttcagcagagcaattttgcgcaggatgattttggtcatgttgaagtccatgttcggaccgatggtctgaagcatgaatcccagatcctgggcttgagtgttgtcttgctcaggagtcgagacatcaacaatgcagtcgaagttgcctttcagatcttcacgattaactttgacaaactctttattggtaatacggatgacttcgaattcactcagaaactctgagttcatcgcaatcatcttggcaccaatctcttgcatcaacttcgacaagcgacgaacgatgctcagttcacgcttactcgatgcatccagcacaccacgaataccagcagcaacatcacccaatgcagcggaattgataccttcaccgaatcccttgacgccagacatagactcagcgtcttggttctgcaactgcaacatgaccattgcagactgaggaatctcagggaacgtgtgttgaataacaccagcagctggtgtgatattcgggttgaattcgtagtcgagaccattgtcatagcgacgacgattcaatgggtcaagcatgcccttagccatgccctgctgaccattggcactacgccccatgatatcgatcatgccacgcatgactgcgcctacgatgcgctggttgtctcccagcagctcagcgtcaggttcaccatacagctcacgcttcttcggtgagtagcgtgcaatgacgaatggcagcttggcatcagggaatggatttacttccatgcggacaaggatattgccgatccaagtagccacaataggagtcagatcgccatcaccatcaatgtcgtaaaagccccagtactcaaatgcgacaactttcttacgagccttgtcgttgaactggaacgtatccggcgtgatcgtttcatgctctggatgagtagctggactgttgttgtcccagatcactttgtccaaattcttgtaacgcttgccttctttcttcaactcgctttggctcgtttcgaaagagacgatgacaaacattgccttatcaagatcaccattacacgatggatcgatgatcacattgtgtggattcagcacttcaagaatcggacgattctctattagcttatcgaccttggtagatacaacgcctgtctgtattgcataggtagcttgcccactttcatcatacagatcgacacaagcacgagtagcaggatcaactgattcgttgtatccgcgaggattggctttcttcaattcaatcgcttgctgcaaagcctctgcttgttcagcagtttcgatctcataatgatcgaacgtaggaacatcttcgttcactttgatgctgtgttgcttccagccaacacgaacaattgcagtgccttcgtcaacatcactgcgaaccaagtcatcaaggaattgaaccttgttgatctgattgtcgaactgataattcaacagcagttgattctgctcagcagcagacacgtcttcagcagtccgtggcttaacttcgaacagacgatggttcgacagaaacggttctgacagtgctgcataacgccattctgcttgacgacgaatcagctttggctgcacagatgaacgcccacgaagcttctgtgggcgctctttacccgtcacattacggaggttgtcccactccatgatgcgagtcatctgcgtttgatgagaaggcttagctgcttccaagtcacgcttcaaactcagaagcgttggttccttcttccagtcc

SEQ ID NO: 45 - protein, 487 aa, unidentified
  REGION 1..487: note = the amino acid sequence of tail fiber of bacteriophages
MAFATGTAANHVDALDKLRLFLTANESLVAAGQTWQQLRWVPDNLDSVDTTLPFSSGVSLHRMFRPDFRTQNYNDDANGQYLSSTSFTPDQYVRLKMRAARAVTRFTLKAGQSSNVRNYTPRNFRLEYSDDGSAWSTALDVTEQRAWTANEERAFTVPSATGEHLWWRLVTKQTGDYGGTLTGSQWELRSLWLYDGSELVSSSESYLVVKGPGLAGDEEIFAAFRTSYNTGTGEYFMMVQGLTGYLPNEQSPHRQPGLHPSGWPVVPLWGASMPFWFVGSGRRVVFVFKVSTVFEAGYAGFFLPYASPQQYPYPMAIGGSMSPRSDSYRYDFVSAAHSAFPMPGSYNSVSASEVAAFSTTLNVMLPDGSWFDLHNRPSSGGQSESYSRWSSSPGSVLPHGMFDGNNSSSSAGYGIRENVGGGFTVLPSTLFQRQPSGRFLGELDGCFQISGFQNGSENTGTIEGEDYVVFQNTYRTDVREYWALKAE

SEQ ID NO: 46 - DNA, 1464 bp, unidentified
  misc_feature 1..1464: note = the nucleotide sequence encoding amino acid sequence of tailfiber of a bacteriophage
  source 1..1464: mol_type = unassigned DNA
atggccttcgcaacgggcacggccgccaaccacgtggacgcgctggacaagctgcgcctgttcctgaccgccaacgagagcctggtagccgccgggcagacctggcagcagctgcggtgggtccccgacaacctggactccgtggacacgaccctgccgttcagctcgggcgtttccctccatcgcatgttccggccggacttccggacccagaactacaacgacgacgccaacggtcagtacctgtcgtcgacgtcgttcaccccggaccagtacgtacgcctgaagatgcgcgcagcgcgggccgtgacgcggttcaccctcaaggccgggcagagctcgaacgtccgtaactacacgccgcgcaacttccggctggagtactcggacgacggcagcgcgtggtccaccgccctggacgtcaccgagcagcgcgcctggaccgccaacgaggagcgcgccttcaccgtgccctccgccacgggcgagcacctgtggtggcgcctggtcaccaagcagaccggcgactacggcggcaccctgaccggctcccagtgggagctccggtccctgtggctgtacgacggctcggagctggtatcgtcctcggagtcctacctggtggtcaagggcccgggcctggcgggcgacgaggagatcttcgcggccttccgcaccagctacaacaccggcacgggcgagtacttcatgatggtgcaggggctgaccggctacctgccgaacgagcagtccccgcaccgccagcccggcctgcacccgagcgggtggccggtcgtgcccctctggggcgcctccatgcccttctggttcgttggcagcggccgccgcgtggtgttcgtgttcaaggtgtcgaccgtcttcgaggcggggtacgccgggttcttcctgccctacgcctcgccacagcagtacccgtacccgatggcgatcggcggctccatgtcgccccgctcggacagctaccggtacgacttcgtgtcggccgcgcacagcgccttcccgatgccgggcagctacaacagcgtctcggccagcgaagtggcggcgttcagcaccaccctcaacgtgatgctgccggacgggtcctggttcgacctgcacaacaggccgagctccggcgggcagtccgagtcgtactcccggtggtccagctcccctggctccgtgctgccgcacgggatgttcgacggcaacaactcctcgagcagcgccggctacggcatccgggagaacgtcggcggcggcttcaccgtcctgccatcgaccctgttccagcgccagccgtcggggcggttcctgggcgagctggacggctgcttccagatctcggggttccagaacggctccgagaacaccggcaccatcgaaggggaggactacgtggtcttccagaacacctaccgaaccgacgtacgcgagtactgggccctcaaggcggagtga

SEQ ID NO: 47 - DNA, 63743 bp, unidentified
  misc_feature 1..63743: note = the genomic sequence of a bacteriophage
  source 1..63743: mol_type = unassigned DNA
cgatgaactcctgccggccctcgccgttggtggcgtggtggcaggccatcatcaggtcgcgccaccggtcgtgctcggagaagtcctccgcgtccagctgctccagggtggaggccagcatctcgggggtgagctcgccgaggcccgcggcctcgccgtgcgccctggtgggccggcggcagaggcgcatcaggttggcgggcatctccggcatctcgtcgagcgacggggccaggtcgtcccactcgtagtgctgcccgcacgggtgcaccgagccggcggccacgacctggcggccgcgggacttgaactccacgccctggtagtcctccagggagtcgagcaggtcgacgtccgccggcttggtgaaccagtagtggtggccaccgctgccggtgatcgtgtggggcgccgtggagaggtccaggtgcgtgtcggcgacgagctcggccagggagtcgcggccctcggggaagttgcgcgggtcgacgtccaggaccatgacggtcgagggcaggcgtacgcccacgttgacgccggtccgctcggcggtctcgatgaccgcgcgggagtcgtactccttggcctgccaggcgccgtcccgcggggtcttgcctcgctggcggcccttggcgtcctgggcgtcgtacctgtgcagcgggatgagctgcaggccgttctctacgtacgcgcgcatgtcccccgtgcgcggtcgctttagtgcgctcactgtgccaccttcctggcggcggcttcctcgatgatcttgcggaccgcgtccgcctcgctcaccttgtccgggtcgggcgcctggcggcgcatctcctccagcttgctcctcaccacctccctgtggtcctccgacacgcggagggacatctgctgattcaaactcattcccctgtactccgtgggtgcatcttggtcgggccggcggcaggccgggatgagcatagtgcgacgacgcagtgcattgcggaaaccgacgaacgcaatgcgtcaggtccgagggcgccgtcgcccgcggacggtggctccgcgcccggacaccggacggtacattgtcactccctaccaaccgctcaacaaggagcacatgcaatggacgtgaacagtttcatggagcagagcctcgccaaccaggcgaagcagaacgccctgctcgagggcatcctcgacgtgctgaaggacatgaatgacaacggggtggtgatcgcgaacgtggaaggcgagcccgtgcaggtcgccatattcggtgcggccatcaacaacaccgcagtgctgaccgacccgggcaccacctcccagccggccgccgagaagcaggccaagcaggagaccaagaaggctgctgaggccccgccggccgagaccaaggctgccgagccggccgccgagcccgaggctgctccgccgaaggacgacaagaagaaggtcaccatcgacgacgcccgcgccgccctgaagaagtacgcggccatcgagggcaacgacgcggccatggacctgctgaccagcctgaacgccaagtccgtcagcgacctggccgagcaggggccggacgccctgcagaagctgatcgacaaggccgacgggaagagcgtctgatgagcgagcagcccaaccagaagctcccgaaggacgccgcgcagctggtcctgtggttcaagggcctgccgcagccgaccgccttcctggtcctccgcgaggaggccgaccgggccgtgcagtccttcaaggacggcgaggacgtgaccttcctctcctaccccgacggccgcggcgtgcgctccgagtcgatcttctcgatcgacgacctgcgcggcgtgaccttcgagtaccccaccatccagctcgcactggtgaactgacatgccaagcgtccacgcggtaagaaacgcgtcgggggcgaagcggtggatgaactgcctgggctccatacgaatggagcacgggcgccccaacaactcctccccggccgcacggctggggaccgccgcgcacgcgctcggcgaggcctgcctgctcgacggcagccaggcctgggagtggctgggtggctacgtccgcctcgacccgaccgagcaagccacggtacaccggcccgccaactccgtactggatgtggcggcgtccgacgtctccgtcccggtgcacgcctcggccgacgggctgccgcccgcgggccacgaggacttcccgatcgacgccgacatggcggacgcggtgcaggtctacctggacaccgtgcgcgacgagatggagcgcatggggccgcacgccgagatggaggtcgagcgccagttcagcctcaactggctgatcggcttcgacttcgacttcgaggcctgggagaaggacccgtcctacgtcagcccgagcggcatccactacgcagccactgacgagttccccctggggcacctgttccacatggacggcagggtgtgctggggcccgatgttcgggaccaacgacgtctcgctgtacctgcccttcgaccacgtctccgtcatcgactacaagcacggccagggcgtcgtcgtcgaggtggaggacaacgaccaggagctgtactacgcgctgggcaaggcgcacgagctccggtgggccttcgagaccctggacctggtcatcgtccagcccagggcgcgccaccaggacggcaaggtccgacgctggtccaccgacaaggccaccctgcgggcgttcgaggccaggctgcgcgaggcggcccgagccaccgaggagcccgacgccccgctcagggcgggcgagtggtgcaccttctgcaaggcggcggccgtgtgcccggcgctgcgcgaggaggccttctcccaggccgccctggagttcggggacggcttcaccgaggacacagtcgtgcaaagcgggcccgaggacagcgacgaggacctgatgctccggatgcgggctatcccgctgctggacatattcatcaagtcggcgaagaccgaggtgctccggcgcctgcgcgagaccccgggcggtcaggcctgcttcggcaagctggtacgcaagaagtcgaaccgcgccttccgccaggacctggtggacgaggtgacgggcgagccggtgtcggccttcgacgtcctggcggccgagggcatcccccgcgagatgatgttcgaggagccgaagcccaagtccccgagcaagatcgaggcggtccgcccgccggagctgatggccaagctgaaggccgacggcgtgcgcgccccggcggcgcacatcaaggcgctcgtcgcgggcgtgtcgttcaagccggagggcggcatcaccgtggccgcgctcgacgatccccgggaggcggtcgacgcgacggccgcggccgagggggacttcgacgcgtacgacggcgaggagagcgcggactaacggctctagttggatcggggtggaagcatgatgtgcttccaccctttctttttaccaggagaacaccatgcacgaacacaagcccatgcaggaactcaccaaggccgacctgagggagatcgagcgctcccgcgagctgatccaggactgcgccgccgacaggggcccgtccctagaggagcgcctggagcgcgcccgcgccggcaaccccaccaaggaggacctgaaggccttccaccgcgaggcgctccacgccgccatgctcgacttcatccaggaggagtccggcatggtcaggggcctcgccgcccagggcaagaaggacctggcccgcgaggtggtccgcctgcgcgccctggtgaagaccatcaagcaggcgacggagaacgtcgacccgtcgcagccgaacttccagcacgccgaggcgttccgtctgatgacctacatccagaccaacgccgagaagccggacgcgcccgaggtgctgaaggtgtggaacagccgcgacggcgtgaccccgttcatcgtccacatcggcggcaagacgttcgagcaccacctgcagggcatgaccggtccgctgtacgacctcccggcgtcggccacgcacaagtgggtgacgcgcaccgaggcggagaccatggctgcctggcggcgcaccctcgaccgcgccgtggcctccgggcggctcgagccggacaaggccgagctgcagcgcgacaacctgtcggcggcgcagtcctggcactacggcatcggcctggtcagcgtcgtgtcggggcgcttcaccgacgaggagctcgaccggccgctcggtggtgtcgacgagacgcagaccccggaataatgagcgcctgccccggtgtcgccgtccaccgcctccctctcgggttgcgtctcggcggcaaacagacccggcaccggggcagactccacctacatcgctaaacagtcaaatcgctactaaggagcgcatcaaatggcagcagccaagcagaacgaccgcaaggtcacctccccgaagttccgtgccagcttcgcctggatcttcaagccgcagcccccgatggagggcagcaccggcgaggccaagtacggcgtcaccatgctgttcgacgcggcggcccgcaagacggcccagttcgaggccatgaagaagctggcctacgccgcggcgaaggagaagttcggcgacaagctcaagccggacggcaacggctggtaccacggcctgcgcaaccccttccgcgacggcgccgagaagtcggagctggagggctacgagggcatggtgttcgtcgccgctaccaccaagatgcagccgggctgcgtcgaccagcagctgaatcgcctcatcaccgacgaggtgtccgaggacggcttctacagcggctgctacgcccgcgccaccctgacggcctacggctacgacaaggccggcaacaagggcgtcgccttcggcctgcagaacgtgcagaagctgggcgacggcgcggcgttcagcggccgcaccgccgccgagaacgacttcgactccgtcgacgacttcgtcggcgagggcgagcagtcctcgggcggcggcagcttcctggactgacgggtccagtctgaccgccccggtcagtaccgccgacgaggcaggtaagccccaggaggggaccttcgggtccccttctttttgcccgtttgatggcgtcccagggcggaaagccccggcatgatagccccacactgtttcggagcacagaccgtgagcaaagactggcaggccgacctggccctggtggaccagcgcaacgaagaccagcgctggcgtgaagaagccgcccgcgtcctggcgcccgtgccaggccagcgcgaggccctggagcgggcccgcgccaggctggcggcagagcgcaagtcgctgctccagcggggcgctgaattgctggggttcaagtgagccccacgaagcgcatgatggacctcattgaggaggctaactaccagttcctcaaggacgaccgcggctgggcgctgtacgacggcgacgaccgctccgaggtcaggggatcgcggtccccgcagctcggcaactcaatctgggcgtcagccaaagagctgggcctcaccaaagaggaggagtgaagatggacgcagaacgtaggaagcggctcaccgagaagctgaagaagtgcatggccctctcgaagagcccggagccgcacgaggcggccgcggcgctccggcaggcgcagaagatcatgtccgagctgggcatcaccgaggacgagctggacggcctggacacggccgacgtggtcgtcaagactcgcgagggctttggcaagtgccgcaccatgagcaacctggccaccatgatggagcgcgccttcggcgtcaaggccgtcttcgagcggaaccccggctccgccgcccgcctgaacgtccgctacatcggccccaagggccgcgtcatgctggccgagtacgcccacaaggtggtgtggcgggcgatgcaggcctcgtgggacgacctgctgacccgccggcccgacatgaagggcgacggcggcaagcgccaggccttccacatcggctggctcaactccgtgtacaagcagatctccgccatcgccccgacggaggccgaggaccgcgccatccagcggcactgcgacaggatctacgagcacggcgtcgtccagcaggacgcgttcaagaagaaggagctcgacggcggggcattccacgcaggcgcccgcgcggccgccgacttcaccctgcaccggccgatggaagagcagcaggccgcactggagcacatcgcatgagctggctgaagaccgtactgtggtacatcctgaccggcggcttcggctcgaagctgctgaccatccccgagagccagcccttccgcgtcgtgaaggccggcggcaggctcctggtcgagcccatccccacccagatggaccccgacgagccggagtacttcggggtcggccagcggatcatcgtggcgccgcacgccggcttccacaagggcgcccgcggggcggtggagttccacgcacccgacggtcgggtgtgggtcaagcgcgacggggcctccagctgcgtcttctactacccgcacgagctcatcaaggaccccgcatacgaggtgcgcccttgaagtgcgacgaccaccagcactccctgccgtgccccctgtgcgcgctcgccgcctggcccctcagggacctggcggccgtggcggacttcgccggcaaggccgtcgacgacacgggcatcgtgccgggggagaggaccgtcaggctgtcccaggtggtccggtcgatcggtcggcggtggaccgagctgtcgcgcgttcagctgacggccctgaagccgctgtacgccaccaagaacgccctggtgcgggaggcccgcataggcgcgatcgacgtcggccggcttgagaaggctgccctggcggtcgccaagggcgccacggccgacccggacccagtggtcgacgcctacgtgcgcgccatcgtgcaggaggaggtggactggtgaagttctcggcataccaccgcaggaagcggttcaagcactggcgcgacccgcccgaggcatgcgacagctgcggcgagcgcctggtcgtcctgacgggcaacgaggtagtctacaagcagcctgtcgggcagtggccctggatctacctgtgtatgtcctgcggggcctactgcggggtgcacccgcactcggtctaccccatcggcaccttggcggacagagagaccagggcgctgaggtccgccctgcacgccatgatagacccgctctggaaggacgggcacatgtcccgcttcaagacctacaagatgctgtccaggatgatgggcatgccggagggtgaggagttccacataggcaacctgaccagggatgagtgcatccgcgccggcgaggtattcaaacactgggagatgatggcggacttcaatgagccgccctgatacagtaagcggctagcccggaggatccatggtaatcgccccgaacaaagagccagcgcaggtctctgacctgccggagcgctcccaggtagccgcggccgtcaagacggccctgttcaagatcgcctccgcctcggtgtacgagacggcgggcatccactacgagacgaacgcccccaaggcgacgatcgactttgaaacccgctccgcctgctccatcaaggactgcggctcctggcggtactccctcgaccccacgacccaggtcatgtgcctggcgtttcgcctgccgcactgggagaagggccgcacggccctgtggcacccggccttcccgcacctgggcgtcgaggaggccgactgccccgagctcgccgagctgttcgagtggatcagggagggccgcctggtggaggcccacaacgcctggttcgagcggggcatctggaccaacgtctgcgtcccgcgcatgggctggcccgcggtcggccacgagcagtggaggtgctcggccgccaaggcggcggcgtactccctgccgcgcaagctggagctgctggcgccagccctggccctgaaggtggagaaggacaccgagggcgccaagatcatgaagaagatggcgaagccgcgcaagccgctcaagcgggacgtggtcgcctggatcgacgacgagggcaccctgccgctgcccgccaagaagtacaagatcgacctgttcgcgaacgacgacgggacctacacggccgtcgcccactccccgatcccggacgtcgaggaggaggtcttccgcctgccactgttctgggtcgagagcgccgagctgctggagcgcctgtgcgcctactgccgcgtggacgtcctcgccgaggaggccgtgtcggaccgcctgcgcgacctgtccccgcgcgagacgcagatgtacctcatggaccaggcgatcaaccagcgcgggttccagctcgaccgggagggcatcgaggcggcgctggagatcgtcgacggcatctacaccgagctgaacgccgagctggtcgagatcaccgacggccgggtccagaaggcgacgcagcgcgcccgcatgatcgagtggttcaacgacaacgggctgccgatcgagaacacccagggcggcacgatcgactcgtggctcaagcgggaggacctggagccgagggtcaggcgcgccctggagctcgtcagggccctcgggcggtcgagcaccgccaagttcattgcggcgcagaactgggccgacccggagacctggaaggtccacggaggcctgctctaccacggcgcgggcacgggccggtggtccggcgcgggcctgcagccgcacaacttcccccgcggcaacatcaagaacatggcgctcgcctgggaggtcatcaagtcgcgcgacctggcgatgatggagatgctctacggggacgccatggagctgctgtcccacgccctgcgcgggatgatcgtgccgtccgagggcaagaggctgatggtggccgactacgccgccatcgaggcgcgcgtcgtgctctggctggcgggcgacgacgaggccctggacgtgttccggcggaacgagtgcatctacatggcgatggcgaccgagatctacggccgcctgatccacgacaaggaggcgcaggccgaagagcgccagatgggcaagcaggcggtcctgggcctgggctaccagatgggggccaacaagttccggaacaccctggcagagaagtacggcatcttcatcgagctggagttcgcccagaagatcgtcgacgcctaccgcgccaagttctggcgggtcaagaagatgtggtgggaccaggaggccgcggcgatcgccgccgtccggaccccgggccgcgtcgtgaagtgcggcaaggtgcagtggtgctgcttcgacggcttcctgcactgcaagctgccgtccggcaggctgcttggctactgtgacccgcgggtcgtcatgaagccgacgccctggggcgagaagaagcccgccctcacctacatgggcgtggacccgtacaccaagaagtggcgtcgccaggacacctacggcggcatgcttgtcgagaacatcacccaggcgaccgcgcgggacctgatggcggacgccatgctcaggtgccacgaggagggcctgtacagcgtcatcctgtcggtgcacgacgaactgatcgcggagtgcgacatggaccagggcgacgtcaaggacttcgaggccacgatggcctacaccatgccgtgggccgacgggtgcccggtgaaagcagagggctggaccggaatgaggtaccgcaagtgatccaagtaagcaccgcgggggcgccccgattcaggctgccgaactacaagcaccagcaggacgagtgggaccgccacagggacgacgacgcccgggccctgctgtggcagatgcgcacgggcaagaccaagtcggtgctcgacctggcctgctaccggtacgagaagggggacatcaccggcatcctggtgctcgccccgaacggcgtgcacgtcaactgggtgcgccgccagctgccgatccacatgtgggagggcgtcgagtacgtcgcccacgcctggcaggccagcgaggcgagcaagcccggccacgcggcgtccctggaccgcgtcctgcgggcccagtccggcctgtcggtgctcgccgtcaactccgagtccatcatccacgacaagccggccgcgctcatcaagaagttcctgcagaagcacaagggccggtgcatgctggtggtcgacgagtcccacgacttccggtccccgggctcgaagcgcaccaagcgggcacgggcgctcaagcgctactgcagggtgcggcgcaccctgacgggcacctcggtgtccaacagcccgctggccgcgtacagccagttcgagctgctcgaggaccacgccctgggcttcgccaccttcggggagttcgagagccagtacgcctactacgtgcaggagaagaccaagggcggcaggtcctacgaccgcctggaccactacaggaacctcgacgacctgcaggccaggatgtccaggtgggcctccgtcgtgctccgggaggacgtcgacgacatgccagacctgctcatggacccgaggacggtgctcctgtccgaggacatgcaggcccagtacaagaagctcctgaaggagatgatcctggagctcgaggacggcggcgaggtggaggcggtcgagggcggtgcgcggatcatcaagctccagcagctcatcagcggctgggtcatcgactccgagggcaacgtgcgcgacctggtctccgacgaggagaacccgaggctgcagggcatgctggaggacgtgcgcgagtcggaccggaagtgcatcgtgtggtgcaagttccgggaggacatccgccgggtggtgcgcaccctggagaaggccggcatcgcctgcgtcgagtaccacgggaacgtgcactcccaggcgaagcgccaggaggccatcgacctgttcaacaacgaccctcgggtgaaggtcttcgtcggccagcccaaggccggcggcgcgggcctggacctctcggcggcggacgtcatcctctggtactcgcacacgttcgacctcatcgagcgggaccaggccaacgagcgggccacccagatcggcggcaagaccgtcaccatcagggactacgtcacgccggcctcggtggacgagtacatcctcgccaacctggagtcgaagcgctccatctccgaggagctagccggaagaggcctgcgcgaccgactgctggctctgttcagacagcagctgtgatactcccggccggacgtgcgaacgacggctccacgacaattagcccggcgttaaactacacccactgacgcacgccgggcaagccgcccgaacgggcggcgacagtccaatcccaacacctatctctgaaggagagatgcagatgagcgaagacaccagcacccagacctccggcgaagcgaccgagaccaaggaccaggctccgaaggccccgggcgtcggcgagatcgccaagggcctgatccgcgacggcaagaccaacgaagaagtgctggctgccatccgcgagcagttcccggaagccaagacctccatggccagcatcaactggtaccgcaacaagctgcgctcggacggcgagaaggtgccgaccgcccgcgagctgaagggcgacgccaaggccgaggccaaggccaagaaggacgccgagaagcaggccaagaaggaagccgccgagaaggccaaggccgagaagaaggccgccaaggacgccgagaagcaggccaagaaggaagccgccgacaaggccaaggccgaagccaaggcccagaaggaagcggacgcccagcgcggcgagtccgccggcgacaagggcatcttcgagtaatcaccgaagcggccgggcagttcgcctggaaatgatggtttaaggggcacggcccctgccataagatagagggacctggtgcagaccaggtccctttctctatatggacgtccaccatgctgccagccaacatcgtcttcgccaaggtctacttcgtgcggggcggcgcgcccaacttctggaagcgccggtacgagatcaccgacccgccgaccagcggcttcgcccacgtcgtggtgattaagggcgagaagcggtccaccatcctctgcccccactccctggaggccttccaggtcagcaaccagtgcggcgagctccagacggcggagcgcttcgacgtcgagccgtccaagatcgcgcaccacatcgagaaggcctgggagacctgcgtcaagctgggattccagaaggactacggcgtggccgccatggtgctcaccgagatggggttcccggtgcccaagttcctgcccccgccgcccgacccgtccaagtccgacgactccaagcgcggcggcaagccgatcgtcgaggactccctccgcccgtgccgccccgagagcaagcgcggccaggtcgccgccttcttcctgcacgacgagccccagtcgcttcatgaggcgatggcccgcctcgggctgtcccgctccggggtgctctcccacctgttcaccctcaaccgcgaccacggcgtaggctacgagctggtaaacgactgcgcccgcctgctggtgcccgagggcttcgacctgttcgcctacgtcgagccggtcaaggagcccaagccggagaagccgcagcgcctcaacgaggacggcacggtctacgagcccaagaagcggacgagcggcaagccgatcaaccaggacgcgctccggccgatccccgagcccggcaagcgcgccacggtggcccggctcttcgtctcgggcttcttccctatcgcggacgccatggcgcagctggacctggaccgctccgccgtgctgtcccacctgttcaccatcaacaaggagaacgggctgggctacgagctgagcgaggacagccagcaggcccgcctcctggtgcccgagggccaccagtgcttcgcccccaagcagccgcgcgccaagaagacggcggaggcctgagcatgggcatccgcgtccagctccgcccgcacaaggagggggtggcggccctcgagcgcgacgggttccaggtggagcccgtacggttcagccggggtgaccacctcatcgtccgcgtcacccgcggcggcgcgtcctgccaggtgacgctggccggcagcccctcgggccagttcctggacgccctggtctgcgccgcccggcggggcatcagggaggctgcggcccgatgaacgaggtgcgctggagggtgcgccgccacggccgcctcctgagggtcgaggcctgggagggcgacgagcccgaagcgggcgagctgttccaggagcggctgagggagacgccgttctggatgctggtcgcctgcagcctggtcaacctgacgacctggcggcaggcccggcccgcgctcgaccgcctgatggcggactacccgagcccggaggcgctgtcccgggcagagcccgacgacctgcacgacgcgcttcggcccctggggctgtggcgccgccgggccgtcactctcaccaggctcgcagctcggtggctcgaggtggacccccgaagcgtcaagattgagtccctgcctggctgcggcaagtacgccgccgacagctgggcgattttcgtagacggcaggaccgacgtcgacccgacggacggcaagctcacgtggtaccttcaacaactgaggaagcagcaagatggatgagatcgacacgaccggcccgcaccaggccctggtagcagcactggtgagccgcatgctcctgaaagcggagcagttcaacgtccagatcctggacacgcccatcccgggcaccccggagatcctgtccagcatccgcatggacgcctcggtcgacgccctgaacgaggagatccaggagttcaaggacgcccacgctgacggcgacgtgctcgaggccgccgacgccctggtggacctgatctacttcgccctgggccgcctcgtcgagatgggcgtgccaccgctggccgtgttcgacgcggtgcaggccgccaacatggcgaaggtgcgcggcgacctgtccaagcgccccggctggaacggccgcgacgccgtcaagcccgagggctggcagccgcccaaccacgactggctgctcaccttcgacctgtccgacgtggcggagctccaggagctgcgccagcaggcccagggccgcgaggccatcagcccggtgtggctggagctgcagcacctgcgggagaccaagggccaggactacaacaacgtcccgggcgggcgcgaggcctacttcccgttcggccacgagtcctacgcacacatgctccacaccaagaacctgcgcatccagtcgctcatcacggctatgcgccagggccgcgagcccaactacgagggcctgtacgacaccgcccgcgacctggtgaactacggcacctactacgccgagtggctgaagcagcagggcctcgggggcgcgaagtgagcggcgtcctcatgccgttctacgacgtctacggtgcactgatcgcctgggccttcagcagcccgatcgaggcgaacgagcgcaccggaacgcgcgtccacgtcggccggggaggcacggcgttccgcgtcgacctgagcgacggcctcctgccgaccgtcggctaccgcaagaccttcccgcggtccgccgcggcggaggtcgcctggtacgtgcggggcgagcaggacgccgccttcatcaccaggtacgcgccgttgtgggacaagtttgtcgagccgatctacccgcagactcctgccggcactgaggctaagtcgggtgtcgcattcccgggggttcgctctgcttacggctaccgctggcgtcgccacttcggccgggaccagctgcggctcgcggtcgaggcgctgcgcaaggacccgacggaccgcaggtgctacgtgtccgcctgggacccggctgaggacggcctgggcgcccaggggcagaagaacgtgccctgcccggctagcttcaccttcagcgtgacgggcggggagctgcactccagcctgttcctccgcagctcggacctgttcgtcggcctgccgtacgacgtcatgggccacgcgctcctgatggacgccgtcgcccacgagctgcgcatccggccgggcgtgatgcacgtgacgctggcccacgcccacctgtacgagtcgcactggcagatggcggcggagatgctccagcacgagcccgtggtgccgcagctcccgctgccgggctggacgctgagccaggtcgagcagcaccccgacgactacgtggtccgctacgccgaggaggcgaagcagcaccagtggcccgcgtacaacccgaagcccgaggtcattgagtgatggaggtgccgaccaagcgatcccaggaacagtgggatgggttcttctaccgcatggccgtactggccgcggccatgtcgaaggacccggaccgcaaggtcggcgccgtcctcgtgacgcccgaccggcggcaggtctccccggggtacaacggcttcccgccggacgtgcccgacctgccgtcgctcctggccgaccgcgccttcaagctggccaacatggtccatgccgaggacaactgcctccggcaggcaccgttccccacggcgggctgcaccgtctacgtgacctcgttcccctgcctcccgtgcgcctgcaagctgagggaggcgggcatccgccgcctggtggcaccgaggcccgacctcggccaccatcggtggggcaagtcctgggccacgtcgatcgcggtgctcaccctcgccgggatccacatcacctacctagaggagtacaaccaatgcgactgctgctagcttcatccatcgacggctacctggccagcggtgccgacgacgacatgcgctggacaggcaagacggacaaggccatcttccgcctgctcaccatgtcgaacgccaacgacgtcctgctcgccgggtcgacgaccttcgaccagatgccccgcctgccgaaccgctccatggttcgcatcacccgcgcgcccgacgccgagaacctcggccttggcaagtccctggggcaggcccagctggaccacccggacgcatggctcatcggcggcccgaccctggcgctcgccgcgctcaggctgggctacgtgacccgggcgttcatcaccgtcgtgccaacggagctcggcggcggcatgcacgccggcgagctggccgagttcctgcccaacaacggcgacacgccggtgcagatctccgtcggggacgtcaaggtgcgcgtcttcaccgaggacatgaagtggcccgggaggtaaggctctgggagtggctgcgggaccggctgaagggcaccgccggcctgcacatgcggcgggtcgagaacctggtgagctcgggcgacccggacgtggacgggtgctggaacggcctgtacttcgagctcgagctgaagggctgcgaccggcccaagcgcggcggcaagctcggcttcgaggtcaggcaggcccaggtcgtgtggcacaggaagaggtggcggtgcggcggcaactgctggatctacgcccgggtgggcaagggcaccgacgtgcgccgctacctggtgcccgggttcaaggcccaggaggtggccgacggggtgaccgaggaggagctggccgccatgtcggtgctccgcccggaccacacgccccaggaggtgctggagtttgcgacaaactcattgggcaatcgcagcatgctcgcctagctggaacgatggtgttttggctcggaacgtaagcgcatactgactccgtgctccaccactggggcatgcgacaaccgggcgacgacccggaccgcacactagaacgaaggagaatcagtcatgccgaacaccgcccgcaccatcaaggaggaggtccgcgtcctgggccgccgcaagcgcgccctcacctacccggcgatggtggacatcatcaaggcccgccacccggaggcgaacacctccgtcaagaccgtccagtggtacgcttcccgcctccgccgcgacggcgaggacgtgaacgtcaaggacggccgcaccaccagcaagcccaccgtgcactgagccacggccggggacaaccagtgtcaggggacctgaggggcctccggagacgtccgggggcccttctctttatatgtacggcgcccaaactggccttcgcgaaactttagcaaaataatttgctggagggggctcccatttgggaaaagaccccatataatgacctcacaccaacgcaaacacgtgaggcacgatatgttcgaggtcaagtttggcggtaagcgccacccggcggcaaccctcgccgacgcatccaagctgttcaccgcatggattgatgccaacgacttcggtgcgtccgacctcaagaagtccgacggcttcctctataaggagggcagccgcgcctactacggctacgtctcctacaacggccgcacttggcgcggcgtctacggtcaggagggccacgtggagatcttcgaccgcgtgatcgagaccacggcggactacgtgcctcccactgaggaggcacctgcggccacggtcgccatcgcgaagccgaagaccatcgctgacgtgatccgcgcgggcatctcggcgggcctcgataacgcggcggtgctcgccgaggtcaagaaggccttcccggaaggcagcacctccgccgcctgcgtgtcctactaccgctcgaagatgaagaagtcgcccgccgccaaggccttggcggcccccacggaagcccgcaaggtcaaggtggagctcaagtccgtcgagtacctcgtgaaggagtggcgtcagggcttcaccgccaaggtgtacgtcgacggcaaggcctactgcaccgtcatcgacatggacgacgaggcgtctccccacttcgagttctcccgcatcgacgcctacaagctgctcgacattgtggagctgcgttcgatggcggctgacatcctcgcgaagagggagtacgaccgcctcacgaagggcaaggtctgcatcatgaaggactccaagctgtacaccatcaagggtgccagcgaagagctcgtccgtcagaagaaccccaccgccaccgtcatcaatggcatgaccgttgcacagttccgacaggtcctcaagactgttgaagccgcacagtaaccccatcattcaagcgcggtagcccaagtgttgggactatcgcgcccacaacccgccataatggaacccatcgacggcacgcactgcgtcctcgatccaaccgacccgtccaaggagatcaccatgaacctgtccaacgaatccaacatcgcagacatcgccgcccgccacaacgagctgagcggcaagggcgccgaccccaagagcctcgcgaagcgcggcaaggccaagctgctcgagcagatcgccgcgatggaggccgacaagactgaggccgccatcgtcgagctcgccggcacccccacccccgagctgtcggagaagatcgagaaggcgaaggaggagcccaacggcctggccatgctgctcacgcagatgaccaacaaggcctccaagcccgccaagccgaagaaggagaaggccgcgaaggagaagaaggagaaaggccccgtgatccgcgtcgtggctgagggcctgctgctcgaggtcatcagcaaggacgaggacggccgcccctacggtcactcctacgagaccatcctcgacaagatccgcgagcagttcgacggcgccaagacctccgtggcatgcctccgctggtatgccgtccacatgcgcgagcgcggcgagaaggtgccgaaccgcccgcgcgcccagcccaagaaggagggctaatgtcacagatgagaacgtacatcgtgggctccgtgcaccacaagggggcccgcgaggcgatcgccgacctgaggaccgacgaggtcctcaccctcaggcgggagccgcacaaccagtacgaccgcaacgccgtggccgtgtacgacgcctgcgggcagatgctgggctacatcccgaggcaggacgcgcccgccgtggcgaaggtcctcgatctcaagctgcccgccgtggcgaagtgccgcgccaagggcaccacttccgtagagataaactgggagaccaaacagtatgagcagcaaccgtaacgacacgatcgacctgctggcccgcctcctgtcgggagacgtctgcccgcacgagattcagctgcagcgggtgaccgccctgctcggcatcgtggcgtcccgcacgcccggcggcctggtcgtgacccgcgaggagctcgagcagataggcggcaagttcatcggcatcgagcaggaccccgactccggcgagatccgcatcaccgcaggcgagccgcccgccgaagcgccccagcccacccaccccgcgccggcaacccgccagtaacggccacggttcaaggagagacccacatgccccgccactacctagcacaagccctctgcgtcctcgccgtccttgccatgggcgtcctcctcatcaggacgttcgcgcaggcgctcgaccgccccatcgtacacgtctcctggcacaccaaggagtgcgtccaggtcgaggaccccaaggccgagtacgagggcaagaagtccgagtggagctgcgagcacatgccggaaaagtaccagcgcgtgtgggtctactgacggcgtcgaccgcgccggggtcacgccatgatgcctcccaggaactgtccctgggaggcatcatcgtatgtgcgagctggatgagggaaatgacgacgggctgcgggccgcgaggggcataaccctggcggtcgggctgagcgtggtgttctgggccgtggtcgtcggctcggtcgtgctcgcccgaggctgccacggcgtgccttctgggcattccaggccggccctggcatccaaggcggcctaggcccggggcctaggacgagtcaggccgcccgaaggcggcctgactgtctgagatccagaaaaagccaccgcccggaggcggtggaaggggatgcctggagaaggaggaagccaggcacccgccgcggggctcacttgctgaagatctccttgacgcccatcacaagggcgcccaccatgcctgacacgacgatgccgagcatggtcagcagggtcttgcgcttcagggtctcggtggtgctgcgccactcgcgcaggtgctggaagtccttctgcacctcgatggggtcgtcgaccttcaggccgagcatgaggaacgtctcccgcacagcctcacgaatgagcgccctggcctcgtctggggtgagattgtggagctgctgctccgggccgggcgtctgtgcggtcacttggattccccctggggcttgtcggtctggcggctgtcgcggtagaagtcgagctgccaggaggcctccttagcccagcggatcgtctccgccaggttgcgggagagcgactcgtacccccgagccgttacggcgaagagggtctcgccgtcgacctggaccagccgccactgtacggactcagtccgtacgggctggggctttggcaggacgggcagcgggggctgcttgggctccgccggcgggtccaccctgggtggattgctcgagcaggcggaaagcatcagcagtgccagcattgatgcgagactgtatgagacccggcttcgccctggcgagcgcgccgaggtcgtgctttgacaggacatccgtcagcttcctcgtggtttcgccagcctcacgctggacagtggagaatcgttcgagcgactccgcctggatcttggcggcatcatcccacttgtctatggcgagttccagggcgtccgccctggccttctccgccgccttgccctgctcgagggctgcaacctgggcgctgagctcggccttgtcctcgaccaggccgtcgtaatggcggtatgatagcacgatggtcgtgaccaaagcaaccccgataagcgcgccagcgccgagcttgtatcccaacggaatcatgtcaccctcctaggggtagatgttggcgggcagctcgaagtgaggcccgtccaggaacgccttctttcccatagccttgcggcggcccacgtactcggcgacctcgtcctcggggtcggccaggtcggccagcgcgcggtcccagaccccgccccagcggatgggcacgttcagctcgaggctggcctggcgtaccgccatggcgaccttgtagcagagggaccagtcccaccgcagctcagccttgccgtccccgtcgaagtcgatcagcggcacgaggtcgaccgcgtggccgaggccgtcccggccgggcaggtgccgcgagtccatggtctggctggcgccgcgcgccaccagggtcgcctggcgctccctggtgcgcaggccctcgtagacctggaagtccacgccggtcagctggattgcgcgctccaccaccttgacgaggtgggggtgcacgcccctcaggctggcgcgcgacttggtacccagtgcgaagctcatggtatgtcctccattctctgcgatgcccctggtgccggggcgggcttgccggcattccctgccggggtcttcagcttggctcgggccagggagacgtcctcccaggtggcgccgaacacgtaggacccgacgatgctgatgagcgtcaggaacgccatcgtgattgccgtgtccgccggcccggaggccaggttcttgtacagcacgtacccgatgacccacatgcagaaggccgacacggcgaacatgaagcgccgccgcaccctccagctcgacttccagttctcgttgcggtcggtcacggcgtaatctccgtccatacgaagtcgcccccaggcccggtcggctgaccgaggtaggccctgttgctgaggaaggcgggcggcgtgacgctgcgccaggcggtgccgtccgagatgttggacgtgcccgcgccgttcggcgacgagctgcctggcaccgtgccggtgacgaccgtgatgctgccgtcgttgtagaggccgacctcccacagattgtcgttgctgttgccagtgttggaggagccctcgtatcggatcaggaagcaggcgccagacagcacgggcccggcgaagacgttctggtaggaccggtcggccgcgttgatgagcagcgcccgtcccgggttggtgggcgacagcccagagtacgcgctcgacccgaagccgaagtccacgtggctgttggagctgatgtagatgttgttctggaacgtcaggccgaacagcgggaactggaacggcagcgccggcagcacggtgttgctgtcgtccacctggccggaccagacgttgttcaggccggtacggccgttgagcgtgttcaggtagccgataccgccggcgacctcgccagaccaggtcaccgaggccgtgccgtagatggagccggtggcggtgatggtgaacgagtaggcctcgccatcggtcgtcggggtgccagacagcaggcccgaggagctgagggcgactccgtcgggcagggccccggagctgaccgagaacgccggggccccgaccaggtacgccgtggtgagctgcaaggacaccgccacgtcgacggtgaagctcggcgcggtattgcggatgcggcccggcacgctcggcagggcctgcagcctgtcgaagatcagggcgttctggaccggggcaccgtcggggtcgaaggcgatcgcgaagaacccggcggtctcgggcagcaggttgccgaccctgaaggatccgtccaggccggtcagggccgcgccggcgggcatgccggtccgcctggcgtacaggcgcaccaggcagtttgccagcggcgagtccacgccgtttagcctctgcttcaccgtgccgccgaccgcgtacaccgcggccggctcggcgccgacgggcctcggacctccggcccaggacggggtgcccggcacggccgtcggcaccctgtagcgcacgaagccccgccccatgaggggccgaggtgacggcacggccgtctgccgcgccgagggtcgggcgtagctgctgtaggccgaggggttgggcccgcggagcgaccccagcccgtacgaagcgccaattgcgcccaggtcggccacggtcagctccaggtgtccgaggtctcgatgacggcgcgaccctcgtactggcggaacgccaggaaggtcttgccggccaggtcgccctcgccctggaaggtgtcgccggtgttcagcacgtactgcagcggggcccacagcccgggcatcttgccgagcagggccgccatgttcgtgccgcccggctcgtggatccagaccggggacatcatcagggcgccgtcggggccgtgcgggtagctgaggctgccgttgcctccccagttgccggagccggacagcgagtagtcgtggcggcggccgagctgcacggggccgcccaggccggtgtaggacctcacggcgtagaggccgggcgcacccgagctgacgctgtacgagacgaagggctcctgttcggaggtggtcgggctgctgctggccttgccctggatgcaggtgttgaaagtgttggcaggggagtacgcgtcgtagtccccgaaccagtagaactcccggtactgggtattgctcgagccggcgtccgggtagttctggaggtacaggtacatcatcttctcgttcgcgacgagcacccacggccggccggccgaggtgctgccggtgtagtgcacgtgccagtacagaccgcccgggatcaggtcgttggtgggccagcgaccgtcgcccgcatcgatgccggtcatggtgtccatgccgtacacgcgggcggcgtacgtcgacgagcctcgggtgtcgtccacgtacaggtaccggccgcggctgcccgcgccggtcttgaaggccgcacggttggtggcggtaaagggcttggtccagccggcgccggccttggagccgtagccgtcgaccaggcacttggtgagcaggttgagcagatcgccggcgttcgagccggtcagcacgggcgcgctcgggtcggagctggagtacactcggacggtcatggggtttcctcagatggttagtaggatcatgaagttcgacgggagcgggtccgtcgtgcccccgccgccgtccgtgccaaatacgaagcccagggtcagggcctggggcggatcgtacgtgccgtcgaacaggaacggcacgctcagtgcctggggcggctggtactcgtccatgggctatatcccgggaacgatggagaccaggtcgtatcgtgcgtcttcaccgtcgtagacgaaaccaaccttgtccgcgcgcgacccggtctgggtcacggcgtacgcctggatcagggagttgaaccggaccacgccggagggcagcccgacctggcaccctcccgccggcggctggcgcagcttcaagacgcagccctggccgtcgatggccccggtgaagctcagcaccaccgtggccgtgagggagatccggatctcgtcgtactggccccagtcgcactcgaaggtgcctgcgtcggtgtcggccacgtgctggatgcggcgggcgtacggcgtgccggggttgccggggtcgcccttgtcacccttgtcgccgggctcgcccttcagcgaggccagccagtccgggatcgtgccgacgaagccgccgtcgacggcgatctcgtaggcgctcttgccgtcggccccgtcgtcgccgtccgcgccgcgcaggttgtccagggagaccaggttgatccaggacgtgtccccgacgtagttccactggatgtacccgtcggccgcccgcagctgcaccggcttgccgtcggaggcgaagaagtcgagctcgctccacttcttggtgccgtcgccgaccttcagcttgacggcctggccggggtccagcaggaagccgatctcgccgttccagaggaccgggtccttgctgttccagttcgccgacgtgtcacggcgctgggcaaatcgctggggtactacgatggttgccatcaggctccgcctccgtcaaagatgacctcgtcgggggtccaggtgcccgccgtgatggtgctctcggtcgtcccgactgccgccgtgtaggcgaaggtgcggcggtggcggttgatgctctcgcccgcgtcggtgatcgagtacagctccatcgtgacgttgccggtgtacgccaggttgccggtcgccgaggtgccgctgatgttatcgcgagcgaccagcaccgcgccgccagcgtccaggaacctcatcccgtaccgcgtcccggtctccgggccgatcgaggcggcgtcctgggtcggcaggacgtcgccggtctgctgcgtgcggtctcggtgcgcccaggtgacggacaccgggccggccgcggtcgcgggcttcctggcgccgtcgacgcgcaccaggcccggcgggtagggcctcgcctgccgcgccaggatcggggtgacgtcggtcggggccgactccagggcgagctggccccgggccgcgttcgtcagcagcttgacggacacctgctcgccgctggcgtactcggtcgagtccatgccggtgtgctcgccgccctggcccagcacgatcaggcgggcgccggacgcgaccgggagcggcagggagtccagcacgccgcgccggaccgtgacctgcgtgtcggtgaaggagacgatctggacgatctccttggcgttcgaggggccgtagccgatgaccgccaggtcgcccgcctcgacgatggtccagtcggtcgtcgcacccagggccatgacggtggtctcggggctgtcgtcgtaggcggcgctgatgacggcggtggggcagaagctcaggtccgtctggtcggcgtagcccgcgccggcgctgacgtacatcgccatgttcatcgaggtcccgccgggcgagacgcccgcggccagggcgtagccggccgtcttcggcagctgctgggcctgggcgtcgccgatctcccggacgagcaggtagtacggggtgtccatcgccaggcggtagggcgacggcagggcctcgccgctcgggggctgccactcggagggcggcggcggggcgtaggacgccgaggtgagcgagaacacgtcctcgacgacggagagcttgatctggttgctctgcagctcgcccagctcgatgttggtcacccggaaaacgatgttctccacgccgtactccgcccaggagaagcggaacacgtcgccgatgttcagggacgccgcggcgcgggtcgcgtacagggtggcggtggccagcggggtggacagggccttcaggtcgcgggcggcggccacggtcgcgatcgagccgttggtgaagcccgggtactggatggtcgtgccgaccgtgctgccctggttggcggctagggcgatgtcctgcacggtgatggagccgtccttgccggtcgacttctcccagtacgccacgctgacctggttggtcagctcgtcaaccgtgcggcgcttgaagtcggagacgcggatcacgttctcctcgtccagcaccatcagggtgctctcgtcgtacccgcctcgggccagcttgagcacgaagcggccggtcgaccggtcggtgtacagcgagccgtcgatgtggcggagcacgatcgccaggaagtcgctcaggtcctgctgggtgtcccagagcagggacatgcccatggactccgagtgcagctggtcggcggccaggcggaacgcggtctcgtccatgtcgccctcggggtagcccatgccccagtccgggtcggtcagcacctcgcggacgatgtgggccgggttcatgtcgccgtcgccgatctcggccttggcgtcgtaccactgggccaggccgttctgccgggtgtgcacgcgggtagccctgaaggcccagagcttgaggtacgggttgttgcccaggtagacgcggcggagcaccacgcccagtacccggcggaaggccgggattgcgccgccgagctggccggccaggtaggtgttggcgacctggtcgtccttgcccatcatgacgtcgaccgtgccggcgctggccgcgatcggcgtggtggacgggtccagcggcgggtcgatgcggtcgccgtaggacttgttgaggtagtccagcatgaagccgccgatgccgccctcccgctccttgccgccgaacaggttcggggcgcagaccatgatctggccgccggtcgagctgcccttccaggccagcttgtcgtccacccggatctcggtcagcttgtcgaccggcccgtggcacaggaccatgtgcatgcccaggaagtacttgtacccgatggtctgcttcttaccgccgcccatttttggactcctctacgacggccagggccatgccgtccccggtctccgccagcttgtctgcgtcgatgccgtcccggaggaaggcgctgtagtccagcccgtggcgctggaagaatgagcgaacgccggcggagcagtagcccagccggcgcatgtgttccatccgcaccacggcgcggtcgtccgtcacttcttgccgcccttggccttgatggcctcggtccggaagtccccgtaccagcacacgttggggcccttcaggtccctcgtgccgaacagcaccgggatggcccgcccgacctcggccgtcggggcggtgatgtccccgaggccggccggcttggcgttctgcggcttgggcatcatcgcgtaggacgcgacgagggccacgatgaagactacgatataccaccaaatcatgctagtaacctctcagacgatggagcttccgtcgaacgggttgcgcgtcgggatccacgggaacccgccgaagttgggcaggttgttgaacttggcggcgcacgtcgtcttcaggtggttgcagcccgggtacagcctgaccgcctggtcgcccgcgaggctggccagcggcctggacagcacgaccgtgccgccggtgtggctcacgatgaagcgggcagcgccgtcgggcgccaccaggatgccgccggcgaaccacccgtcctcgtagttgccctcgacgcccgacaccacgacgttgaggccctggctcatgccgatgaccgtgccgttgtgccggtagctctcccggttgacgttgcagccccggccgtacagtacgtggcggcagccgtactcgaacttggcgcgcagccccgggcggcggatcgaggtgtagaccggctcgcactcgaggtcgatggcggagtcggcggcagaggcgctgagcacgcgccccttccagtagatcacgaactgctggtccgggtcgccgtagtggccgcggtagatggtgagggaggtcacctcctcgggggagaacccgaggaactggctggcgaactcgtcgtcccgcgggaacttgaccttgatgccgttcttgaagatgtccgtcgactgcttgacccggtcgcgggagacgctggacggcttgtacaccacgccgtcccgcaccacctcgaaggccccggaggcgaaggcccaccgctgcagcccctgggtgaactcgtacagctctaccggcgccccctgctccctggaggcctctatcgttgcgtagctcatcagtctccctcgggcgtttcgatgacggggatcgtgctgctgcagcggcccgcgtatgagtgggtgatctcgacgctgtcggagtccaggcgcacgtggcgcatgaagcagagcaggtcaatctcggacgtagcgaagcccctgccgaagccggcagcgagcgacagaacctcgttgccgtccgtgtcggtcgagccggacagcacgcggttgtacagcaccgtgccgtcggtcagcacgagcatgaggtcggtgaccccgtagtagagggggtagccgatcgggcgcaccgtcagggcggtggcggccgagtcgacgttggtgagcacctgtaggtcccggttccagctcggcagccagaagcccttctgcttgccgcggcgggcgtggagccaggtgcggtagcgccaggcctcggccctcgacagcgcgtccagcccgatggtctgggtgctctctgggtagccccgctgcgggtcgacggtgatcgggccggacccgttgtcgaactggtccaccggccggatgatcttctccgacaggtcggacagcatgactgacctgtccatgagcacgtcgcgcccccggtactgcggcagcccggcggacgcggccaggtccacgttgttcgtcaccaggaactccacgcgggcctgggtcatgtcgtcgggccgacgggcgaactcggacccgttcagggtgcgggcgtaccggagcggcatcacgtaggcgttctcgaaggagcgcccggtcgggacctttagctccaggccggaggcgtccgcgctcagcacctcgacggtcagcagggtctcgtcgtcctgccacagcagggcaatgtcgttgttccggtagtcggcgctggacgcgtcgaagtcgaggcgggtctggccctccaggacggtgccgaggcgggtgacctcgccccagaccgggacgccgtacacccggtgggcccactgcgtgctgatggccttggcccgggagaactggtgcgggtcgagctggaactcgtacaggaagcgctgcctgggggccgtgcggagcgccaggcgctgctcggacgagtaggcctgcagcaggtccgtctgccactccagggactccctgaacttcgtctgggggatgaagggccagagcacgacgcggcggccggagagccgcagggtcggctcctcgtcgccgaagtcgaagacgtactggcccgcgatcgtcggcgcgccgttggtcgagatgctgacctggtagatgcgggactccagggcgccgaacgtggtcggcggcgcctcgggctgggtcagcgtcacgccgtccaggccctgggaggtgatggcctccagggtgcggccgtcgaagtgggcgttccagacctctacggcccgcgtctggctggacagcaggttgcccaggtcgatcacgccgggccggatgtgcacgcgatagtacaggtcatccacgaagccgccgacgcggcggtccgatccgaaagacggaggagcgagcacggcgacgggcggcgccggcggcagggccagccgcgaggcgcgcgagtgcctgggctccacaatgggaaagccccaggggtaggtccatgcccccagggtgctcgaggtgtccagcgccgaggcgtccggcgtcggggtcaccaccctcaaaacgccggtcatctgcaccactgccatgtcaggcctccttcaggatggcgtacccgcgctggccggtcgcgccgcccttctggtagtacgggaagaccttccaggtgtcggatccgagggtgaactcgtcgccgggcacgtagttggtcatctccagccggcgcatgtgggcgatctcgccgtagggcgaggcgaactggttgccccggccgatgtacacggtctggcgcagcagggccgtctgccagccgagagcgctcggggtgtactggcgcaggccctcgtcgtagtacgactggccgatggcggccagcggtccgtaggtggacgtgtccgccgtgtacctggaggcggcccagccgttgttggagtccacgttgcatcgcacgaagctggcggagtcactcccccgctggtagcccatgcggaacgggatcagctcgttctgctgcgacgagtccgggccgtagccgctctgctcgtagtacgcccaggtcggggtggtgctcgtgccgccgaaccaggcgccgcccagggccgccgagctgaacttggagaggctgccgaagcccagcatctggaagcggccggtgcggtactccacgacggcgaagatgtcgtccgagtcggagtaggagaagaagtggtaggccggcacggcagccgtcatctccgagatcatgcagccccgggtgtagccgttgtagctgggcgcgccgggctggcggaatgcccctcggccggtgtccgcgccgtcgtacccgtcggccatgctgagcgccaggcaggagtaggagttgctggagctctgggtgtacccgttcaggttgtcgttgagggcggaggtgccctggtgggagcacaggccgacgaagagcccgttcttctgcaggttgaggcgcgccgtctggcccacgccgtcccaccggttgacggtccagcctgccgcgatgcagaagagccggagcttgtccagcaggtcggcgacgctcgttgcggccccggtctcgtatgccatgtctatgtcactccgccttgagggcccagtactcgcgtacgtcggttcggtaggtgttctggaagaccacgtagtcctccccttcgatggtgccggtgttctcggagccgttctggaaccccgagatctggaagcagccgtccagctcgcccaggaaccgccccgacggctggcgctggaacagggtcgatggcaggacggtgaagccgccgccgacgttctcccggatgccgtagccggcgctgctcgaggagttgttgccgtcgaacatcccgtgcggcagcacggagccaggggagctggaccaccgggagtacgactcggactgcccgccggagctcggcctgttgtgcaggtcgaaccaggacccgtccggcagcatcacgttgagggtggtgctgaacgccgccacttcgctggccgagacgctgttgtagctgcccggcatcgggaaggcgctgtgcgcggccgacacgaagtcgtaccggtagctgtccgagcggggcgacatggagccgccgatcgccatcgggtacgggtactgctgtggcgaggcgtagggcaggaagaacccggcgtaccccgcctcgaagacggtcgacaccttgaacacgaacaccacgcggcggccgctgccaacgaaccagaagggcatggaggcgccccagaggggcacgaccggccacccgctcgggtgcaggccgggctggcggtgcggggactgctcgttcggcaggtagccggtcagcccctgcaccatcatgaagtactcgcccgtgccggtgttgtagctggtgcggaaggccgcgaagatctcctcgtcgcccgccaggcccgggcccttgaccaccaggtaggactccgaggacgataccagctccgagccgtcgtacagccacagggaccggagctcccactgggagccggtcagggtgccgccgtagtcgccggtctgcttggtgaccaggcgccaccacaggtgctcgcccgtggcggagggcacggtgaaggcgcgctcctcgttggcggtccaggcgcgctgctcggtgacgtccagggcggtggaccacgcgctgccgtcgtccgagtactccagccggaagttgcgcggcgtgtagttacggacgttcgagctctgcccggccttgagggtgaaccgcgtcacggcccgcgctgcgcgcatcttcaggcgtacgtactggtccggggtgaacgacgtcgacgacaggtactgaccgttggcgtcgtcgttgtagttctgggtccggaagtccggccggaacatgcgatggagggaaacgcccgagctgaacggcagggtcgtgtccacggagtccaggttgtcggggacccaccgcagctgctgccaggtctgcccggcggctaccaggctctcgttggcggtcaggaacaggcgcagcttgtccagcgcgtccacgtggttggcggccgtgcccgttgcgaaggccatctgaatctcctcggttagtagcccagcgagctcttgttgcggttgacgacgttcatgatgagcttctccccctcgtccgtgccgaggtagtcgcccaccaggctcgggtccagcacgttcacgttcttcacgtgcacctgcggtgccatctgcgcgggctggttgccgccgtccgggtatgaccggccggtcagctccctgccgcgcaccgaggcggggcccttcaccagctccgggccgtactcgccgacgatgccgaccttgccggccgggatctggccgccctggtcgtacgcgccggcgaactgcgccccgttgatctgggagatgatcgaggcgccggtggcggcgacccgggccatctcagccaggttggccgggaagcccagctcctgggccttggcgaggccggtcgagatggacatggcggcctgggcgacgctgaaggccttgctcacggcgaatagtaccttgtaggccttggactgctcgccagcgtaacccttggccagcccagcgaggccgtcgaacagcgtggccgcgccctgcagctgggtctggatgcgctgcgtctccatctgggcctgctcctcggtgaactgcttctggaggcggcgcagcaggtcctgccgctccagctccgtcaccgactcgctatccaggatcagctgcttcttccgctcgtaggactgcttgagcgcctcctcctcggtcaggagggagttgtacaggctgtcccgctcggactggcgctgccgctcggcgtcggccagggccttgtcgcggtccttgacgacctgcgcctccagctccgcccgggccttggagccctcggcggtgttggcgcgcaccatctccatgcgccggtcgtaggactcccggatggcgtcctcctgcttcagcagcgactggcgcagctgctccagctccgagttgccgtaggcgcccagcttcttcagctcggtgtcgcgctcggcgtcgaggcggctcatcagcctggtgcgctcgtcggagcccgccttggtgttggcctcgatgatcgccctgcgcttgtcgtaggaggaccggatggcctcctcctcggtctgcagggactccttgagccgggcgaactcctgctcccggcgcttggcctcggcggccgcggccttgtccacgcccgacgaggcgggcttctggcggtcgccgccgatgcggaactgtgccaggcggtccgtgccggccgccgccttcttcttggcctcctgggccttgtcgtactcctcgcgcaggcgcttggcggcctccagctgctcgttgctggacttgagggtcgcgtcgcgctcgtccaggatcgcagagatggactccatgcggacctgggagaggcgctcctgctccgccacgaaccgcttcatcgaggcggcgatggtgtcgtcggtgaagatggccttgatgctgtcccgccagaactcggcgccggcgatcatcctgtcgatgccggaggcgaactcgacggtcaggatctggaccatcgcgcgcaggttggagggcagctccttgaaggcgctgatgaggaagtcgacgacggactcgccctcgtcctcccactggccgaagttgtccttgatgaactgggtgacgatgtcgatggacttctcgatgtccgtgccccagacctcccactggacggtctgcgacttgagcagcgcctccatctggcccgacgcgatcatgtcggtcagctcctggagggcgtcggtcgcggtgcgcacggaggcctcgatggcgtcgccgatgccggactggctgatggtcagccacagctggtcccaggtgtcgcccaggttcgccatggcgccgtcgagcgagtccatgcggcgctccatcgcgccggcgaactcgttctcgcccaggtccgtcaggtacttctcgatctcggccgcgttgttgccgatggtggtggcgacgccccggaaggtcagggtgacctggtcaccctgctgcttcgccttgatgccgaactccttcaggcgctcgaactctccggtggcggcgtcggccaccgcctcgatcatctggttgaggtccttgcccatcgcactggcggtgttgccgtacgacatgagcgccttctcgctcggatcgaggcccaggttcaccagcttggtgaagccgtcgacggcctggttcaggtcgtagggcgtgttctgggcgaactcgcgcagggcgtcgaaggcgatggccgccttctcggaggagccggtggcggtgatgaggcccgcgttcagcacgtcgaactggcgttgcacgtccaccagcttgttcagggtgcccattacgctgacggccgcggccagcggccccagcagcttggtgaaggcccccatgaggcccgcggtggccttctcggccccgccgccggcggagctcaggcccttgagtcgcccctcggcctgctggacctggagcgactcgatcttgattgccagactggcgacgtcagttgccacggttgttcaccttccagaaaatgcggtcgagggacttgatgaggtccgcctcccagcccagcagaggcttgccggtcatctgcgaccaagcctgcatctcctggaaggtgagcggcaccccggcgaacacctcacggaaccactcccagatgtacccgagctcctccgggagctcgggcgcatcctccagctgaggcggcttgcgcttcagcgtcttccacacctgcatgagggacgcacgcagggtctgcttacttcccttcgggatcaggtcgagcttgaactcgtgctctgcgaaggctgcgagctgctcgacccggctgcgaaaaaaagggcgcgcttggacgccgcgacgtcgatggagtccatgatctggggcgcctcgacgaagaaggcctccacgttgtcgacggtgcacggctggtcgaacgaccaggcgaccacgaggtgagcggtgaggcggcgcttcgccttggcgatctcggccgcccgctcgacctgggagtcgagctgggcgatccggatcgcgtcccggcgggcctcagcgtcggcctgccggaacgcgtccgagtcgatgccgcggatgcggacccagtgctcgctcttcgtgccgtccgggcgccacagggggacctggatcccctcgttggcggtgccgcgggtgaagaactcgttcatgccagccgcccccgcggcgttgttattgttctggtccatggcttatgcgggcaccttgtcgatgatgatgttggactgggtcacgctgtccaggagggcctggaacggcatgctcagggtgatcgggccctcgccctcgacgtccggctggccgccgttgtacttgatgcggggcagggtgaagacgtacttgttgcctgcgccgtccgggagctcgaagacgatcgaggactcggtctcgttgatgaacttgtccagcagcagggagttctcgaagtacgccgtgatggtgcccgacacgttcgaccggccgatggacggcaggatcgacttcttggagcccaccacgaagcgcgcctccaggccgttctccaggttcagctggatctcggtgatgacggcgatcggcgtgccgttctcgttcagggtaccggtgaacgagtccagcggcgaggtggtcgtcggtgcggcgtaggtcgcgccggcgatgatggcctgggcggtggacatgtccgagccgaccgtgccgaaggtgccggtaatcatcgcgttggcgctgatggccagcgccagggtgttcagctcgacgccggtgaagcggtggtacggcttgtcggccgtcgcgatgtcaccgaagaagcgctcgacggtgaaggagcggcggaccgtgccggccttcaggcggtcgccgtcgccgcccggggcgccgtctgccacccaggtgcccagggtgacggcctccagcaggtcgtcgaagctgccgaacgagagctcgaagttgatgtccccgcccacctggcgtgcgccgtggcggaagtcggcgatctggcggtcgtcgcggatctcctcggactgcagggactccttggacaggccgagggtggtgcccgtgtggcggatgggcttgaacgcgggggtcgccggggtctgaccgtagacggtctcggcgacgtagcgcatggagtggcggctgccgtttgccatggtggtacgctcctactgtggattagtttcgagagacccgggcgaaccaggtgacggtcatgctcacgcggtaccagccatcgacctcgcgcccgcgtgagcggccgcacgaggccaccgtgagctcgacccccgagtgggcaagtcgcttgcccgccttgaagtagtcagtcagctcgtccgccttggccgtcacggccgcctcgccggtgttgagtgggtagttcaggtcgatctgcaggatgccgtcgtgggcgtcctgaccctcgttgcccagggtggcgacggagggctggttgcccatgatgaagaccgaggcccagggactctggtccgacggcttgtcgaacggggcgttcggcacggcgtagggcagggcgagcggggagtccttgaccccctgacgcagcgccatgtccagcccgctgtaggtgttggtagccattgtccgtccttacctgccgaatgcccgggccttggcggccacgatccgcttccaggaggccacgtgccttcgcaccatgccctccggcgcctgcttgctccacccgtcgtactcgatccgctcgacgtacggcaggttgttcgtgaaccagaccacgtcgaccagcgagcccaggttggcgacggcctccgacatggccgcgccgcctcccaggtcgagccggtcgatcgcggcccagttcggtgagttgatggtcgtctgccagttgccgcgcagccggccggtgtcgaccggcgtcgcgaagatcaccagcttgaagagctcgaggaccgaggcgcggcgcacctggtccaccctcttcagggtcttgacaccgaaccccttcagctgctgctcgaagcgcgccacgttacctccggagctgcagggcgaacagcagggccaggcccgccggatcgaccgagtcgaagtccacgatggcccactgggtgccgctctcctccaggaagacgtcgccctgcttcgggcgctcgaccgcctggatgtagaccagccggtcgccgcggcggatgttctcgccgtcgacctgcttgtcgctgtagtcggttatgacgccgacgaccgggaagtcggtcgggccggagcccggggtgacggtgccgtcgaccgggtcaacaacgaccgggccgcccggacgacggagcctgcaggactggccgaactcggccagcagcgcgtcgacgtcgtccttcatggactggtagtcgaaggtcgccatgtcagcccctcgacagccggccggagttgccggactcgacgaggccggcctgctgcagcgtcatggtgacctccgggaactgcggcgtcgcggccgccaggttggccccggagctctcggcgaacgtggtcgagagctcgatcggaccgaccttcttcgtcacctgggtgaccttctggccgctcgcgtcgaacgtggggtccggcatgagcggcttgcccgagagggcgcggttcgcgaccatgcagaccgccaccgtgagggcgggcggcaggccgcggaggaatgaggtgacgccgccccggggccactgggtgccctggagccggcgtcgctgccagcccacccaagagtaccgggcgtcgaggtaggtcgtcgcgttcacgatcgcctgctcgagctcggtgtccgtcttggcggagaggtcgacgccgcggtccgcccagtaggcgcgcacggtggcggggtcggtgtaggcgttggcgccgtcgaccgtgccgtcgttgtcctgctggttgaatgccatgggtcgatcctctcctgtgggtctgtcaggggcttaggccttggcggccttcgccttggcgcgggtgtagccgtcggcgatcgcgtcgacgtcggcgcgggacggcttcttgccggtcagagcctcgaggcgctcgaggttcggcaggttgttggacgtccagtcctggtcggcggccgggtccagcaggccgatcgcctcagccaggctcggcagcgccggcggggcgggcggctcctgcgtgttggtgttctggcccacggtcgcctggtccgcatcgcccgacggggcgaccacgacctcgcgcaccatcagctcgtcgccctgggtgaacaggtcgccgaagtgggagcgcatggcgccgaccacgtagtccgcgtcggtgttctcgcccggcagggcggcgatggcctcgtccagctgcttgcgggtcggcttgccgccctgcttggagcgcagctcctgcagctcggcctgctcggccggcagggcgccgtagaagccgaagacacgggtgaggctggcgatctgcccgtcgttgccggcgaactcgtactcgccgtcgacgaactcgtgaccgttgacgttcatggtcttgccctggtgcggtcccaccaggacgaagcgctgggtcttgctggacatgatgtccactcctttctcttggcctataggccacgaagccccgccggcgtaccggcagggcccgtggtgctcagttgacggtccgcatcgggatggcggtggcgaggttggcctcgctcagctccaccacgacagcgtcgctccagtagccgtccgggccggggcgagcggcggccgccgcagcgcgggcgtcggccggcttggtggtcgagtcgtccgccacccagacgatgacggcgtcggacttgtcgtacagggtctgcccgcagcgcgagccgctcaggcgtacgaggtgtgcgctcatgtttcctgtctcccattaagcgcccgccggcattgcgccggcgggctaaccgagatcagcgacgccggcggattaggccggggtcacgcccttcagcacggccaggcccttctcgctgaacagcgcgaggccgcagtaccaggagatacgggtgatgctctcgtcggcatcctccttctcgcccacgtacttgacgtgcatgcccgcctgcttctcggcggtcaggccggcgatgccgtgggtgcggctgccgtcgtcgaaggtgccggcgaacaccgaggtggcgttcgtggcggtgccctgggtctgggtgatcgggatccagtcgttgcggaagatcgggatgccgcggtaggccggcacggtgcggcccgacgccatggtgtacacgtcgcccggcgaggtgccgcccagggcgcgcagcagcgccaggtacttgcggcgggtgcgggagtgcatcatcaggtagtcgacctggccgtccttgtcggtgacgaggtcgatcagggcgtccaggtcctcgaaggacaggcccgcgccgttcgccgcgccgttgttggcggtgatggtctggctgcccgcgaccaggctgaacaggccggcgacgttgttgccggtgccgtcgccgttcaccatctggttctggtactggcggccggccgacttggccttggaggcgacctggacggcggtctggtcgttgccgtcgcccgagcgggtggcctggatcagaccgttcacctcggcgtcgccgatgatggtggtcagggtcgaggtcacctgggtgaaggtcgccgggttcttggcggtgatggtcgagccgacgccagccatctggacgtcgcccagcacgttctcgcgattgtaggcgagggcgttgccgtcgatgccgtcgaagggcagctgctcgaagatctcgttgacggtgatgacgttctcgatgacgccagcgacgagctcgtcctgggccagcttcgccgactcggcgagggtaacggatgccattagggttctcctgggaggcgggtggtgggatgcttgggaaaggtgccggatcgcccgacgattcgacccctgggccaaggcatcacgcctctgcagggtcagcgagcgcggcagggtatgaccgtgctcgcgtgctatggttcgggactttgccgtgacaacccgagctcgtaaccccctgaacgctggtccagcgcgagaatctgagcctcctgggcctccggaggcctgcctcagacgagaaaaagctttacggaccaaggacttaagccgtatctgagccgaaacgagccttcggcacgtcgttgtcccaggaaatcggccaggtcccaggtccggccacggctcgaggaacagccctagaaggtctagaaggcctagacggtccagctgcgacaaggacttagaggccgagctgccctagaaggagggtaagactgccttagatacccttatttctttagatctaataaaaagaataaaaatagttctataagggggctcccatatcccaaaagaccccgtataatggactcacaccacggcaacctggtaaacagatggaccgtaagccctcaaccaagatcaaggcaccgcgataccgacaggcctgccctcggcaaccgatgaaccgggaactgtggcgcggtctgtttgaagaggcacgcagcctgcatggcagaccgctcgaggggctcacgtccgtcgacgacggtcgagcgtggttccaaattgcgggcgacgcaacgccctactccgtcctcctgtctgaggacgaactcaagatgttccacctctgaggtagacatgaacaagcccaccaccgagaaggccatcgccttcatggcaaagaatcccacctacttcggctcggccggcggggtggacctgtacgagcaccccaccctcggcgacgagtcgcccatcatggctatcacggcggacggtcgcgtcaagcgcacccacctgtgggacatgtccggcgtcgagtccgaggccgacgagctgaggaacctgtgatgaccgtcaagtacaagaacctggaagacacgcccatcgaggacctcgcgcaggtgatgcagctgctgcgcgacctcgagatagcgcccaccaccgtcatggcctacgccacggcgctcgacgccatcgagacggcggaaggggccttcaccaccgtcgaggttgccctcaacgacaacgccatgatcgaggcggaggacatggacttgcataggacgatcttcgagggcgcagagtcgttcctcaaggtcatgggagagatgtgatggcggccttctcgtgcaacgtctgcggtcagggcttcgacttcggggactgccggtgcgactccctgcccgaccctcagccctccggcggactgccgtccgtcgaggcgctggccgaagccttcgtgcgcctcctgaggatgaacctcgggcaggacgtctacgacaccgtcgtggacctcaactccagggagctgaaccccgacgtgtgccactcgggggacttctgcgactccaacatggtgatggacgccgccttcggggagctcggcgtcgacccgtcttcctacggccgcgaggacgaggacgacggcatgccgcaggaggtctgcgacctgtggaacagtgcgtgggaccgcgccaaggtcctcatgcaggagcgccgtaccccctaaacagtggcattgtaccacctaattgggcgtcatgatgcccgtgtccctaccaaccaaggagagtcccatgaacttcgaagacctgtacctgatccctgacgactacctcgacgccttcgccgaggccgcgttctccctgatcgtctcgcgcttccgccagccgtcccacgccatcgccgtcaagcgcggctggtcgacgctggtgggcaactccgcccacccgacggcggccccgcgcggcggtgccccgtggacggaggccgaggagcgcgacctcctcgtggccgccgccggcaagatcaacctgaccaagctgtcgagggcgcacggccgcaccgagcacgcaatcgcctgccgcctggagcagctcggcgtggaccgcctcctgatcgtggcctccgacttcgagcccgtcgaggcgcccaagcctgccccgcccaagccccgcatgaccccgacctcgccagagtcccgcctacgcaccctgctgacgatcgccatgggcttctccagcgccgagcacgtccgtggcctgcccccgccggacatcacgttcctggtggcggacgacctgatcgacttcgacccgaccggcaagcagcccccgagcctgacggagaagggccgacaggtcgttgactccgtcgtgggccgctcgaccggccgtaagcgcgccgacctggcctggaaccccagccgcggaacctcggagatcactgacgggcgattctacatggtggcctccggcgacgtctacaaggacggctgcgcggccggccgacctgcgctgaagaacccgccgaaggccgtccacttcaacggcgccaccgccgacggagaggccgtgcgcctcgccaacctccacccggggacgcgcttcttcgtcctgcaggcggtgtccgtgcaccaggcccccgagcccgtgctcccgcccgcggtctcgaagcgagtctgacggtacactgtaaccccctgatccgcaaggagttttcccatgcaagagaaatacgaccgctacaccctgttctacggcggggtgttcagccagtggtacccgtcgcccatggtgatcgacggcgtggagtacggctgcgccgagcagtacatgatggcccagaaggcgagggtcttcggtgacgagcaggcgctggacgagatcatggcgacccagagcccggccgagcagaaggccatcggccgccgcgtcaggggcttcgaccgccgccagtgggactcggtgtcccgcgacgtcgtgatgcgggccagcctgcacaagttcaccagcaacccgaagctgcgggcgcagctcctcctgacggagggcaccctcctggtcgaggcaagcccgacggacgtcatatggggcatcggcctggacgagcgggatccccgctgccacgacccgagggagtggcggggcaccaactggctcggccaggtcctgacggacctgcgggagagcctcacggtgctgtcgctgtaaagagaaagggcgccctgaggcgccctttccttttgcccagccgttcggttactggcggcgcttggcaaggccagcggcgatcttctggttgggggtcagctcgccctggcgctgtacgggcttctggttgccggagcccggcggcttgccgccgccgttgggcgcctcgctctcgaaggcccggccgaaggtctggtggcccttcagctccttgaccaggtcctcgaccgtcatgaagccgcccgaggcgttgccgcgcgggtcgcccgagtcgtcgaccacgcggaccacgtagtcctcgccgtccttgacgaccttggtgcgggcggtgatgtgcggcagcagcaggtccggcacgcccttgtgggcggcgatcgcctggaccgcggcggaggtcaccaggtacttctgcagggacttgcccatgccctggatctcggcgtccttcgcctgcagcttggtgttgaagccgctctccagggactgcttcatcttgtcccagttgaccttgccgtccttcgactccgagatcagcttctcgacgcctgcgcgcagggtctcggcgttcatggcgtcgtcgccctcgatgccgagcagctggccgatctgggcgaagcccgagacgtccgggcggttgcgcttggcctcgtcggcgtcgcggcgggccgccttcagggacttgttcaggccgtccaccgcggtggcggtgcccttgaagctgtcctgcaggacgtagccgccctcgccctctccgtagaagccgcggaactgctccgggaccttgtcgatgctgtcgacggtggggttcttcaggaactcgaagtccatcttatctccttctgcgcatcacgcgctggctgttgggcgtcgcgcccggggtgtataggctggcaccttaccgccggcgccgggcccacgcaagccaacgttcaagcagaaagagaaagcccgccattgcggcgggcctcttttacagggagccgggcagctccgcgcccaggtacttccccagggcgtcgtaccagccctcccgggtgatcgggcccccggcgagcgcctcgaggtcggccagctgcacctcgccccggcccgtggacccgtcccgccacctggtcagggtgtagaccctgccgagcagcacctggtagaacagctccggcgccgcgtcggggtcctcgggcacccccggggcgaagtccatcttcccctcccactccgggcccgcctcgaactcgtccgccatgtcaaacctccgtcactgtgatgatgtacttgccgttctgctgcaccacgtcgtccacccggaaccgggtgccgggcatgaacagcacctcgcgctcggtcttgtagtacgagtactgggagacgttcacgccggtcttgccgttgatcctcatgtacacgttgccgctgaacgccgcctgctcgccgtaggacgacgagacgaaggcggagtcctcgaccacggcgcccttgcggtacgtggacagcatggccttcagctgcgagtcgttgaacgtcatgccgcgggagctgacgccctggaacttcggcatcttggacatgccgtgctgggctgcgtccacgtaggcctgcaggtgcgggtccgacgagtacttgcccgcccggagcgcgttgttcagcgcccggtaggtgtttccagtataggcctttaccgctgcgacttcctccgccgttagctcctggagtcccatcgatcgctgcttggcattgaccgccgccaggtcgccggtcggcagcccgttggcgaacttgcgcacgcccgctgcgcgctgggcccccgagtacctcggaggcggcgggaggccgtcgcgcggggtggaggccggccgggaggccgtcatgtccaccgcggtcggggtcacgccctgcttcttggcgacggtcgcctcgttgaaggagacggtggccgtgccctgcttcttgagctcgtactccgcggcctccttcagcttcaccttcatggttgcggagggctcgtagcccgccatcttcttgaccagcttgttggtgttgatcgggcccaggccctgctgctttgccttcttgtacgcctccagggcggccttaccattggcgggcagctgggctgtgaacttctcgatcttgccgttggagacgaagccggtcggcttggtgaaggcggcgttcaggtagggcttgcccgcggccttggccgaggccagctggtactgtgccagctccagtaggtcgtcggcaccgggctgcttgatgaccccgaagaccgacttcatggcctcgtaggcgtcctgcggaccaccgcccgcagccagtacggacttcaccttgtccagggcgagggaggacgtgccgccgagcttctggtccgccagcttgggcttctgcacggggcccgacaccgcctccttgaccgtcgccttctcggagagcgagaccgcgtggttgtaggagttagggctggacttcttccagttggacttccaggtcgcgatgttggtgaccttgacgtccgccgcattggcggggaactgcttcgccagggtctccgccaggtcctggttggacagcatgcccttctgcatcagcttgatggcctcgtccttcagctgcgccgaggtgagggtcagggcagactgggtcgccgccgcctcgggcgccacgacagccgcggcgccggacgagggcacgggcacgacgtccgggatgggcttggccgccacgaccgggccggaggccttgttgggcagcaggccgtccttcttcagctgggacttgtacgaggcgatggacgcctgcttggtctgcgcctccgggaactcggcgaggacggccttcaggacctggtcgtccggcatgccctgctgcagcagcgccttggccagcgacccgaccgaggtgtgcttgcccgcgacctcgtacggcagggcggggccgcccgggagcgggaccttggcgccggccggtggcacggggaacttcttcgccatcgcgtcctttgccgcctggatcgcgggaccgaaggccttgttgaactcgatggcggagaggccctgggacgtcacggcgctcgggctcagggcctggccgtagacctcagccacgagctcgtcggcgctcgtcaggtagtacgagtagagcttccgggcgtccggggacaggcccttcgccgaggccttcagggccgccagaacgtccgggtcgagcagcaggtcgtgctgcttgtggagcaggtggccgagctcgtgggccgcgacctgcttggcctgcgcggcgggcaggacggacagcttcttcccgctcaggaccacgcccttgccggcctggtagtacccgtacgcgccgggcgacccgtccaggtcgtcgacgacggtggaccactggccgccgacggcgtgcttcaggttcggcgggagggaggcgtccaggtcggcgacgacgtcggccaccgccttggcctgcttgagggcgccggcgggcaccttggacgcgggccccaggttcagcgcgccggccttgttcagctcggacttgtaggaggcgatggacgccgccgaggtggacgcgtccgggaactccttcttgatctggtccagcacctcggagggcgacatgccctgctgcagcagcgacttggccttcaggcccacgccgggctggatgacgttcagcttgtcgccctccagctcggccttcagctccgccagggagtagggcttgcccttctcgtcgacgaacttctccagcggcaggccgtcccggaagagctgcgccttgcccttgcccaggacctcgtcctggaactccttggactggcccttcagccacgactggtagttcgtcgaggtgggggtctgcccgatgttctcgtcggcccacttgtcgcggcgggccttgatggcggcgttgcgctcggccgcggacatgcccttccacttgtcgccggcggcctccttggcctccgcccggaagtcgatctcacgctggcggcgggtgcgggtgtcggttaccgtgggccggtcgcccacgatctcctccccgtgcagcacgggggcaacggtcgagcggcagttcgggtgggcgggcgggcgagggcccttgtcgatcgggtagacctcgccgtcccggctctgacagacgggggaggtgcggccgtccagggtggcgacccaccggacgcccttgatgacgtcggcgttggcatcccaggtcgcctggcgcgcggcggtggagacgtggttggtcgccgtgcgggcgatcatctccgcctcccggcgggtggtctccagcacgccgtccttgtagccgccggccttggtgcccctgatgcggcgcaccatctggtcgatggtctcgccctgcaggacgcccagccggatctgctgctcgatgcgggcgacgtcgttggtcgccatcttcccgagccacccctgcagcgggatgccattgatgggagagcccgcgacggccttgacgaccgtggcgggcactgcattgaaggagagggcgatcggcgtcgccccctggagcatggagacctcccactcggcctcggtcttggagaggccctccatgtcctcctcgagctccacctggatgcgctcggcgaccgcggcgcgcatccggcgcacctcggtcaggaggcccctgatgcgggcctccgaggtgtcggtgaggcccgactgtagcagggcgaccagctcggcgtcgctctgggccagcagctcggcggacttctgcgcctccccctgggagaagcgcagcagcctgatctggtggcgtacggtcgcgtcgaggatctcctcgttagcggtcttgggcatcactcgtcatccggggtgggcgggtcgacctgggccgggtcctggttgccgggcggctggttgcccgggggctgctggcccggtaggcccgtgccgttgccgccgccgaacatgtcgcccatcgtgttcttggcctcctcctcgaggaactcggcgtcctgctcctcgtcgaagtcgtccgccaggatgccgcgcttctggagctcgcccaggtaggtcttgcgggagatgtcccgctgcgcgcgggccttgttcagggtgtccagctcggcggcgtccgcctcgccgaggtccacgtcggagtcgacctgcaccgagccgccgtcgtccttgccaagccagttggccgtgtacttcatggccagctcgacgcagtcctggaagtcgtgcacggtggacgccaggtaggacgagctctcggccgagtccagggcgcgcccggtcgccgtctcgtcccccggctgcttgcgcatgtactcggccccgtaggtggccatctggtcctccagggcctccaggtcggtctggcccgccgcgatggccgcccccgtgtgctcgacgtagtaccacttgccctgcacgtcctcggtggtgaggaagttgttggggccgatggtgaccttctgctcggcgggcacgcccgcggccgccaggatggggaagcgcgacacggtgaggacgttgcgctggtcgctcttggattgccagtgctcgacgttcaggtgggccaggtcgatcagcgggggcttggcgtccatcagcccgacgcgcttgcctgcgtagaacgtcacgagggggatgaagtccagggtcgtggtgccctcgctctcgatggcccactcgtccttcttctcgtcgaccagcttccatacctgccagatgccgggctccaggacgcggacccgctcgatctcgacctcctcccagccgacccgctcgacggtggtctccttgatgcggacgtgggtcagcacctccttgccgttgaccatcatggcgtaggcggcgatgaggcactcgggcttgatgtgcacccagtacgggcgcatgccctcggccctgtcatcggccagggtccgggcgaccgccacgccggcagcgtcgaccttctcctcgggggtggggtggtccaccaggacgtgggagaagcccttggcccagccctcgcggaaccaggcccggcagaacgactgcaggttggtgccctgcatgtcgatgtcctcggacagctcctcgaagtcggcgtcgacgtcctcgcccaggacgatctgctcccggaacggcttgccggccagggtgtccagggtctgctccgtcatgttgagcaggacggcccgctcgaggcgggactcgtagttcgcgttggtctcgttgtcgtactggggaaggtactccttcccggcagcgcgcatcgtggtcgtgccgcccaggagggcgtcgatcatcttccacaggggctgcatgcgcaggtaggccccggacggcgtggcgaccgtgggcttcttcttgggtccgtcggccatcgcgggctccttgggctagttgtgagctgatgctcgcgatggtagcccgggaggctgctggttgtgagccagcagcctccgcccgtcacatgtcggccgagctcctgaagcccaggaacacagggaagcgcggcgcgtccttgctgccgcccgggaagaacttgtacttcacgaggcggccgacgagcccgtcgtgccggcggctccacaggtcctggcgctggtcggcggtgaagcccgtgccgatggagaactcaacgcccttgaacggcccattgacggcccgcacgacgagggcgcccatggtgcccatgcccaggaggttctccttgctgtggccgcgctccgtcaggccgagggcactcgtgctggcctcgttggcgttgtgcatcagctcctccatgcggagcagctcggcctcgccgtcctcgaagcgcttcagcttcagcaggtcctgcgccctcagggtgccgcggccgaacttgtagggcgagcaggcgtccctggccatgaggccctcgtacccctcgccaagcacggacgtctcgaccgacaccagctcctccggggtgttgacctcccagtgcggcacgatgacgcacggccggccgagcgccatcacgcgccggccggcctcgtcgtggcgcttgttgaagcccatctcggggtgcgtcacgtcgtcgaagacgtggaagcggaagtcaggctccccggcgatcgacatgaccccgcgggtcgtgttgttgaaggccatcctgtccgccgggtcgccgacgatcagctccccgtccaggccgttgtacatcggctggccgagcacggcctgcacgtggcggttggggatgggcttgaggctgcggctcaccgcgacggagtcccgcacgatgcagcggatgccgtccagcttcggggaggtctgcagcgggaagcgcagcttgaggacgtcgtcgatggacgccgccagcatgggtcggaagctcatcagaagtcccccggcgcgacctggaagcagggcacgccctcggcccgccacatgtccaccaccgacttccggtcgtcgaacacggccacgagcctggcacggtcgtccgggtgcagctgggagagccacaggcgcttgagcttcacgtccggctggtgatcgtgggcgaaccgcatccgcagggccatgcccatgaacgggtcgtgctcccgcagccacggcaggtgcttcagcagccaggcggaggtcttgtccgacacctcgtcggagcggccggaccacacccacacgtcggcgcccgccaggtgcagggcgttggcggtcctgatgaccgcctggcacggggtgtcgcggtcgcaggcggcgtagaactcccgccactgcttggggtcggactcgacgaggtgccggcggtggtcgatggtcgccagtgtgccgtccaggtcgaagatgtagaggggcttactgttcacgggcttgctccagggcttcctcgcccgcttgggtcaggtacattccgacgccgaggcgccggtcgatcacgtcgagggccacgttgacctcggagccgctggcatcgccttcggctaccatgcgggtcagctcggagcgcagctcctccagctcgcggatgccggtctcgtccgccctgcagtacaggcggatgccctcgcggatgccgcggtcgaactcgagcgcgccctcgggctcctcgaaggcggaggcgctccgctcccacagccggtcggccgcctcctcggcgtcctccgccaggtgcagctccgccagcgcgtactcgatgccggcgcggtacatgttgccgggccgccggatcgaccgtgccagccaggcgagcgagatggcgaacagcacgatcgccagggtgagccagaagttgggtggtgagaagtccatcggtgttctccttgggtaatagagaggggaggagcctatcatggcccctccccagtcaaccgcgtaccatcagtccatgcggtccaggacgtacctcgccacgccgccctcggtgcggaccagcacctccagcggggtcttgtcgtccagcctcaggccggaggcgtgctggacgccgcgcggcaggcgctccaggcgtgccgagcgggagtgggcctccagggtggcgcgcacctcgtgcagctccgagcgcaggcactcggggaacagggcgagcgaggcctggcgctggtcggccgcgccctcgatcatgagcaccaccgagttgccgtggtgggcgaacccgccgccccactgggagggctgcttcgtgatcccgaccaccttggcgcggcccgggcggaggccccagttggacgccggcgagccctggtggtagacgtaccaggcgaacgggttgcggcactccacggagtcccactgcaggatcggcggcgcgtcggggtggacggcagtcgtgatcgcgcagaagttgccctggtggggcaccacgacctcgatctccagggcgcgcggcaggacgtccctagcgaacctggcgtaggtcacccgctcggcgcgggtgttgagcagcgcccgctcggtggacagccgctcgtgctgcagcaggtggccgaacaccccgcccgcctggttcttcttgggcggctgcggctgccactcgaacacgacctcgtcggcccgagcggggcgccgctcgagcgaccgggcgagccccatgcgctcaaacaggcgctcggcctgcgccacgttgccggcggtcggcgccgcctgggcgcgctggtaggtcagcgggtccgcgcgcttgttgtggttgcggcggatggactcgacggaggcgccggagcggatgtcgtcgatcagggcgccgagcagcgaggagcgcggggtgcaccaccccttgccggccatggcgacgcggaaccacaggcggcggttgacggcctcgccggagaggtgggccatggccctcttcgcctcgatcaggaactccgccatcttgaccgtcttgtcggcctggttgaggccgcccgtcatcagcatgtcccgggcgcgctccaggtcgcccagggtgaactcccggagggcgaagtgcaggtgcttccggttctcgcgctgctcggccgccacctgggaggcgtccttggagccggaggtgtgggagtgcacgccggggttggtccacaggtgggaccagccgccctgctcgcggactccccagtcggcccggccgccctgctcgcggactccccagtcggcccggccgtcccagaagaactggtccaccacgtggccgcgctcgacggcctcgcgcagggccttgacgaccttgcggtaggggtgacgggagcccagcagggtctcatcccacaggaccgacttggtccggccgtccgaggtcagggtgaccaggctgccgtagcggtgcacgaacgagcggcagcagttgcagtcgtggtactggcggtccagcgggtcgaactgctccaggtagaggtcgaacaggtcgcgcccgacgttcacccggaaggcgttcggcacgacgttcagctgggccttctcgagggccgcgtgcatcgcctgggggcacgtcgtcgaagcgcttggcgaaggtaggtacgcgggcgtggcccatctcgtagggccggtcgcgccgggcctcggacccggtggtctgctgcatgtggttcactggtatctcctgaccgggtgccgccaggcccggatagtaaaagaggggcgacggtcacagtgtaccgccgcccctcctctggagatgccgctgttcctagtttggggcgctggtcagccgaaggcgtcgtcccagctgcccgtcacggcgcccttggagtagtccgtcgccctgttctcgaagaagttggtgtgctccttcccgaagacgatggcgtcgacccagcccagggggttcttgctgacgccgaacagggcgcgctcgccgagctgggcaaggcgctggtccgcggtgtagcggatgtactgcttgacgtcctcggcggagaggccctggttctcgccggactcgtaggccaggtcgatgaaggcgaactccagctccaccatcttctgggcgatctccctgatgcgctcggagtgctctgccgtgcggaggtggggatgctcggccagcagctggtggtacaccttcatcatgaactcgacgtgcagggtctcgtcccggatggaccagctcaccacctggcccatgcccgtcatcttgccgaaccgggtgaagttgagcagcatgatgaagctggagaagagctgcagcccctccccgaaggccgagaagaccgcgatgtccagcgccaggccctccaggccgtcccggcgctggaacaggtactcgtgcttgtccagcatctccttgtagcccatgaaggcggagtactccacctcagggatgcccagctcgtcgatcagggtggagtaggcctggatgtgcacgccctcgcgggcggcgatcgaggccatcgccatgcggatctcggtgggcttgaacgtcggcaggtaccggtcgatgtagccggaggccacgtccacgtccgcctgggtgaagaagcggaagatgtgggtcagcaggtggcgctcccggtcggtcaggtcggcgcgccaggtcttgacgtcctgcgtcatgggcacctcgcgcaccagccagtgcatctgctccgaggccacgaaggcctcgtacgcccaggggtaccagaagggcttgtactccgctctcttcgagaagagggacggactgttgtcgatcatcatgggttgttcctcagccttcacacgcggtgcactcaccgttgaggttgcatgctgcgccgctcacctcgggcaggtcaaccgtctcttcggcctggggcgccggggcgggctcgcgcaggatctccggcatcacgccgaccgaggtggccttgacggagctggagcgcaggtagtagagggacttcaggcccagcttccaggcgcgcatgtggacctggtgcatggtcctcgtgtcgacgtccgccggcaggaagatgttgaggctctgggcctggcagatgaagggctgacgctgcgcggccagctcgaccaggacgcccgggtcgagctccgaggcggtcacgaacagagccttgtccgaggccgacaggaacggcaggtgctgcaccgatccgcgctcgaggaagacgctgcgccagacgtcgtcggtgtcgtggccgagcgcggcgaggcggcgctgcagcgcggggttcttcatgatccccgtgccagccatcgtcttctgggagaaggcgttggcgaccatcggctcggtgctcgggctgacgccgccgcagatgatggagctggtggcgttcggcgcgatcgccaggaggtgggcgttgcgcatccccgtgccgaccaggtcctcgggctccccgcgctcggcggccaggcgcatggaggcggccacggcgtgggccttcagctcggagtacagcacgacgttgaaggtcgcggcctcgtgggagtccagcgcccagccctggtcctggcagtaggtgtggaagccgagggtgccgaggccgatggagcgctcgccgaacacggaggcgaccgcgcgccacatgccgtggggcgcctgctccaggaagacctccagggcattgtccagcatggtgaccaggtcgccgatgaactgctcccgcacgtcccaccactcgtcgcgcttcgccacgttggtcgaggacaggcagcagacggccgtgcggtccggcgtggtcggcagggtgatctcggtgcacaggttcgagtggttgacccggaggcccttggcccgcagggaggggtgcaggtcgcggttggcggcgtcgatgaagaacaggtagggctcgccgaggcgggcgcgctgctggagcatctggatccacaggctgcgggcctggatcgtgtcggtcacccggccggagtgcgggtcgaccagctgccaggggccgttgtcctccaccgcccgcatgaaggcgtcggtgacgttcacgccgtggtggaggttctcgttcttgcggtgcacgtcgccgccggtgggcgatcgcatgttgatgaactcgacgatctcggggtgggagacgtccaggtagaccgcgtgggcacctcgcctggtgcgcccctggtggtaggctatggcctgcgagtcctggacgtgcatgaaggccatcgccccgggggtgtccacgcccttggcggtcacctcgccgatcgagcggacgcggctccagttggtgccgatgccgccgccgttggtcgagagcagggcgttctcgccgaagttggcgaccaggccctcgatggagtcgtcgacgtcgttcaggaagcagctgatgggcaggccgcggttggtgccgccgttggagagcagcggggtggcgaacatgaaccactgcttgctggcgtagtcgtacaggcgctgggccagggcgtcgtcgccgccgctgaaggccttggccgcgcgggcgaaggcctgctggaaggtctcgccggggaggcagtactgcttggacagggtggcggtgccgaactcggtgagcagggcgtcgcgcgcggggtcgaggacaatccccgtcttagggtcgatcatggattcactccggtggttgggccttggcccgggcgtcgggccgagcgcgcatcgtgacgcgcgcacgctcgtagcgcgagccggcgaaaaagaaagccccgacccttgtgggatcggggctctcagcccttccaactcaaccgatggaatcaccatgaccgggctgtccagacccggtaggcgcatgatgccgcgggaggcgtcggccgcgggccgtcgttcagtcccagtgggccgagagcatctcgatctccccgccgcggcgcctgaactcggccacggtctcggcgcgctcctccctgggctgctcgggctgaggggccgcctcgtccgccagcctggagagcctctgccggcgcagctcctggctcttgcgctggaagtagagcctgtcgtactcccgcttggcctcgcggtcccggccgcccaccttcctggacgtgtccacggagccctctatgagcctgtacagcttccggtgcccctggggcctgcaggacgcctcccccgccctgcgcatcttgcccaggacgtccgtgaccgcgtcacggtcgaggcccgcctgcgaggcgatgtgggagatggagtgctcgcccgggttggcctcgagccaggcccggacgcccttgcggacggaggagtaggcggtcacggccgcgtgaacccgggctcgagcatggcgcgcagctgggcgcagctcagcacagagcgatcgatgccgccccggccgtcgggggccatcacgttcaccatcagcggaccccagctcgggctctccgcggtgctgatgtagtggggcacgctgaccaccatgtgggacactcccagcaggtcgaacacggtgcccatgggggtgttggcctcgagccacgcccggtcggcgcgctccctggccaccgcccgcaggaagctctcctgcttctcggccagcatgctcaggccgccgcggctgcgacgtgcctggttgcgctcgtccaccagcttggtggcctcctcctcggagatgggcaggatctggtagggcacgatggcgcccgggtcgaaggtcttcatggtcggactccttggtagggagctcagtttaccgggcccagccatggccgaacgccatcgaactccacaaaaggcgaagcccccgatcggcgggggcttcgagggtgctggcaggggtcggaggcgcttatagcccgccaggctggacgacagtttgctccactcccccatggtggagtggtcccgccgatcctgtcctgccagtctgcaccggggagctccctagggctcctgcaggctctgcgaccgttacccggggagtgggtcgtcgtcggcgggcctgctcaggcgtgcactcctgtgaacatcataagggagctcgccggtacagactgttgggtgggtcctgggcaggttgcgggcctgcttctcctcctggcggcttcaaacctaaccgggaggtgtcctaatccacattagacgacctggaccatggtgtccccgccctcgggtggacctccgggcggggacgtgacgggaggttgatcctgctgcgtggacctttcggatggtcagcccctggaccgctagatcgtgggcgtcgcctcttactcggtgccagcctagcgctgtctcgtcggtcagcgtgtcggaggatggggtaatgatgccgggccgtccgtggcccgcacaccgtcgttcagaagctgccctgccggacggccttccgcttgtgcatgatgcggtagcgggagtcgtcgccggcgtggtcctcgacgtcggtgtcgacgtcgtccgggtccttctcgtcccgcggcatgggcggcacggtgcgcacgaagtcggggcagcgctcgcccaccacgaacacgccgggcgcctcgcgcacggtgggcctgggctcgtccatctcgtccaggttgagggagttcttcagcctcttacggaactgctcccagccctgcttgcgcgcgttgtccgcccgctcccacctgatgcccttggcccgcatgtcgcgctcgatgcagttgccgttctcctcggaccagatggcggggtccgcggggcccggcttgacccggccggcgaggcccatgcccacctccctcaggcggatgccctcggcgatgtccgcggccagcatcttgaggccctcgttctccgtgcccttcttgaggccgtaccactcgccgatgcggaacaggtcgcccctgaccgtgcgcatcctgcgcccgtccgggaacaccaggtccgtgccgtctgactccgcccaccagccgaccgagaagggcttgctgctgccccagtcgaaggacctgtccaccgtccaggtgcgcggtacctggaagggccgcacgacgtgggtctgcgtccgccacaggtcgtcgaacatgccgccggaggtgatgtcccagctgccgtcgagccaggccgcgatctggccggggttcgaggccgccgcccggatgcggttgatgtactcggggtccgcgtccagcaggatgcggttctcgctgatgtggccgtggatggcgatgcggtcgggctcgcccggggtggtgatgatcttgccccgcatgccgggcagcctgaaccgcagcttgacccagttgtgccccttgccgtacgggttggtcgtggcgcgcaccttgcggggcatgcccggcaccgtcgagcggcagcaggagaacatcttgaggtacatctcggaggtggcccagttggtgagctcctcccagccgatccacgggtaggcgtggccgtggtagttgtcgtagtcgtcgaccttcgccatgtggcgcagcaggagctgctcgccgtcggggaaggtccacacgtagtcgctctcgttgaacttggcgcccgggaaccagagcttgaaccaggccttgctcttggcgaccacgtcggagagctgcttgtacgtggcgcggaacaggacgccgcgccaggcggcgccgtagccctggcccacgtgctggcagaagtccgccaggagggcgtcggtcttgcccgggccgcgggtgccctcgaacaggcactcgaagaccgggcaggtcaggaagaggacctggctgccggcctgggggatccaggccttggtccgtgggccctcctgggcggcctgctgcggggtcttcttgcggcgccagtggggtggctggtatgccatcagtcctcctcgtcggccgggaaggccctgtcggggtgcaggaccaggcagtagcaggccgccaggacggtccccagggcccgccaggcgttccgtgcgacccaccaggcgcacttgaggcgcttgcccaggggctccctggcctcggtcctccagaagcgcctggcgcgggtcatcatgtagcccccgcgcaggaggtgggccgcgaagaccggctcggcctcccagttctggtcgcccaggatggacgcgccctgcgaggacatgcccaggagggtgtccgccaggtcgtgggcctggcgcccggtctcggagggggctcgccaggtgcccctgacctgggtcgccaggatctcgccccggtcgtcgagccaggcctccaggtagacgtcggggtcgcgggagtagacgtcccgctccatgcggcgcttggaaatgttggtgacctcggccacggttcacgctcccaggatgcggtctatgacggtgttggcggacatgagctgcttgagccagcgcttgtggtcgtccctcatgcccggggtcatggtcttgtacttggcgaggcggctcagctgggactcggcctcgcggcgccgggcccatgcgacccgcacctcgcgcagctggtccgccaggagggcatcggtctgctccttggtcggggtctcgctcatggcaggtgcccccaggtcgcgacctcgcgggctgccgcttccatctggtcggcctccacgctgaagtcgtggtacgtgtaggccatggactctccctgggcggcgcgctgctggttctcggcctgcatgcccaggaccctggcatgggccgccagtatgttgcccagctgctggacgcatgtggcgttcatcggcgctccatcctggtggcgcactcgatggtcaggccgtagcccagggccagcctgcgcgggtcgacctcgttgccgcacccgcaggcgcagtccccgtcctcccgtggtgcccatcgcttctggcgcgcctgggaggcccgtcgggccgcgtctatggaggcctcgtcgtgcgccagggactcggctgaggcgcggtcgatagggtcggggaagtggtctgcgggctggatgtccatggtggtctctcggggtgtggaaagggcgcccatcagggcgcccggcttgtgctgctctgcgattatcccgcgggcgggggtgcgtcaccgccctcgttgttcccggcgtacttggcctgctgccgctgcacctcctgtgcccaggtgtccttgtcgatggcggccgggatgaccaggacgccgccggccgcgccggtgtgctcgaccttgtggttctcgcggtacttgtcggggcgggcgcccttcagcagggtctgcatcagggcgtcgctgtacttcctgacgaccagctgcttctcctcgccggtgaccttgtcgatgaccgtggtcgtcatgccctggtagatgaccggctcgtcgtacccgtcgaccgcgcggcggaacgcctcggcctcgatgcggtcggccgcctcctcgcgggcgatctcgaacatcgtgttgaaccactcggaggtctccctccagtgctccacggcgccgcgggacacgccggccgcgcggcagccgtccaggacgatgccgcggagcgcgaacgcccgcaggaagaggcggcgccgctcggcggacatgcgctcctgggtgttgaggccctcgagctcccactcgacgagctcgagctccgagaccgggccccgctcgctgaggaagaggcgctcgtcctcggtcatgttcttgacgctcactaggcgctccgtgtgctgtgctggtgcaatggtccgatggtaccgccgcccaggccgggcagtaagccagcggtctcccggggccgacccgccggttcctcgtgcacgaggctccggggaccgcgcctggacgatccggacgcggagcttttgaggggcccgccgtctcggccaccgcccgggctcggccacgaccggaccgatcgcggggaattgccccgcaggtttgccggccgtgttgcccagggcggaccgtgtcggccgtgtccaccaaaaggcctagattagtggatttagcaggaagatctgttttaaaggcttatacaatctaaacctttattaaaaagatctagataagataaaactatgattctgatgcagatttcggcaactgtctgaggttctggaccgtctaggcatctcggtggtggtgccgtcatggtctcggtgtcgtttttcctggtacaacaccgagccaaagcctcgtacggtccgtctgcctcagattccggagctaagtccttgatccgtaagcctcagacggctcgtacggccgtctgagcctggctttccgggggctcagaaggctcgtactcccgccgaccgtggccgagcggggcccccggttcagtcgagggcgtccttgggccaggcgatcttgctgcccagcttggcctccatcatggcgcggcagtcctccaggctggggagcttcgacgcggaggcgcggcccatgcggtccaccttgaccgcgtagtcgtcgtccgccggcttgacctgcgtgttctcgagcctgccgcccaccagcttgttgagccgcatgccgaaggccaccgggtcggcggggcggtacaccctctggtccttggcgaactccgcgtagtccgaccggaggtgctccttgatgatggtgaccgcgccctcgtgccagtcgctgcgggcgttcgggaggatgccgtcgaggagcttgttgtaccaccaccgctcgacgtcgtccatggtcatcaccttctggtccacgagggccgacgtggccggcacgtcgtcccgcggtgcccagccgtcgatgtcccgcatcagcaggtcgtacagcatggcctggatgccgccgtccctgtacatctgcctgttgaggcggctgaagaactccttgtccccgcggcggttgttgctcacctggaagaccgcgaagcggcgctcgccgtcgaggcccgccggcacgacccagtcgccgttggcggccatgaggatgtggatcatgttcttgcccgtcacggcgtcgcggcccttgccctcgtaggcgatggtcggctcggtgaccagctgcttcagcttggcctcgcccgacttgtcgccggcccagaaggcctcgtcggcgaacaggcagatgcagttctgcaggtgcgagttgaaccggcccaccaggtgctcgggcgaggagatctggaggccgtgcgatcccgccaggaacgaggcggcgcggcccagtgtgcccttgccggtgcccttctcgcccttgaagcagagcgccacctcggcggcctgcgacgggtgctggaccatgtaggcgagccagttcatcacgtactcgtaggaggtcctgtcgccgtcgcacagggtctccaggaccagctgctgcagcagggaccagtcccccttcttgggctgcacggcccagccgcgccacaggttcagccagccctcgtgcgtctgctcggggtcgaagatgatgcccttgtactgccggcggtgcggcgacctgatccacagcgaggacttggtcaccagcttgtcgtgcatctccacgagctggttgcagtagaggttctcgaagtcctccttggtggagcgctggaagaacggccgcttgaggacggggtccagctcctccgtgaagatgcggaacttgccgccctccatcacgacgcagtgggtctcgttcatctcctcgagcacgcccgccaggccctcgagcttcggctcggcgcgcagcacctcgtcgtcgacgccctggccgagctcgtcggggtcctcccacgtgtcgaagtcgtcggccgcgtcgacgcgggtcacctcgccgcccacctcctggaccaccttgtggaggaacttgatggtgaccggccggccgccgcggcccgagagggcgtgcagcgagtcccaccggcggccgatgatccaggcgtcgtcctggtactcggggtcctgcgtggaccact

SEQ ID NO: 48 - DNA, 63743 bp, unidentified
  misc_feature 1..63743: note = the genomic sequence of a bacteriophage
  source 1..63743: mol_type = unassigned DNA
aggtccacggaggcctgctctaccacggcgcgggcacgggccggtggtccggcgcgggcctgcagccgcacaacttcccccgcggcaacatcaagaacatggcgctcgcctgggaggtcatcaagtcgcgcgacctggcgatgatggagatgctctacggggacgccatggagctgctgtcccacgccctgcgcgggatgatcgtgccgtccgagggcaagaggctgatggtggccgactacgccgccatcgaggcgcgcgtcgtgctctggctggcgggcgacgacgaggccctggacgtgttccggcggaacgagtgcatctacatggcgatggcgaccgagatctacggccgcctgatccacgacaaggaggcgcaggccgaagagcgccagatgggcaagcaggcggtcctgggcctgggctaccagatgggggccaacaagttccggaacaccctggcagagaagtacggcatcttcatcgagctggagttcgcccagaagatcgtcgacgcctaccgcgccaagttctggcgggtcaagaagatgtggtgggaccaggaggccgcggcgatcgccgccgtccggaccccgggccgcgtcgtgaagtgcggcaaggtgcagtggtgctgcttcgacggcttcctgcactgcaagctgccgtccggcaggctgcttggctactgtgacccgcgggtcgtcatgaagccgacgccctggggcgagaagaagcccgccctcacctacatgggcgtggacccgtacaccaagaagtggcgtcgccaggacacctacggcggcatgcttgtcgagaacatcacccaggcgaccgcgcgggacctgatggcggacgccatgctcaggtgccacgaggagggcctgtacagcgtcatcctgtcggtgcacgacgaactgatcgcggagtgcgacatggaccagggcgacgtcaaggacttcgaggccacgatggcctacaccatgccgtgggccgacgggtgcccggtgaaagcagagggctggaccggaatgaggtaccgcaagtgatccaagtaagcaccgcgggggcgccccgattcaggctgccgaactacaagcaccagcaggacgagtgggaccgccacagggacgacgacgcccgggccctgctgtggcagatgcgcacgggcaagaccaagtcggtgctcgacctggcctgctaccggtacgagaagggggacatcaccggcatcctggtgctcgccccgaacggcgtgcacgtcaactgggtgcgccgccagctgccgatccacatgtgggagggcgtcgagtacgtcgcccacgcctggcaggccagcgaggcgagcaagcccggccacgcggcgtccctggaccgcgtcctgcgggcccagtccggcctgtcggtgctcgccgtcaactccgagtccatcatccacgacaagccggccgcgctcatcaagaagttcctgcagaagcacaagggccggtgcatgctggtggtcgacgagtcccacgacttccggtccccgggctcgaagcgcaccaagcgggcacgggcgctcaagcgctactgcagggtgcggcgcaccctgacgggcacctcggtgtccaacagcccgctggccgcgtacagccagttcgagctgctcgaggaccacgccctgggcttcgccaccttcggggagttcgagagccagtacgcctactacgtgcaggagaagaccaagggcggcaggtcctacgaccgcctggaccactacaggaacctcgacgacctgcaggccaggatgtccaggtgggcctccgtcgtgctccgggaggacgtcgacgacatgccagacctgctcatggacccgaggacggtgctcctgtccgaggacatgcaggcccagtacaagaagctcctgaaggagatgatcctggagctcgaggacggcggcgaggtggaggcggtcgagggcggtgcgcggatcatcaagctccagcagctcatcagcggctgggtcatcgactccgagggcaacgtgcgcgacctggtctccgacgaggagaacccgaggctgcagggcatgctggaggacgtgcgcgagtcggaccggaagtgcatcgtgtggtgcaagttccgggaggacatccgccgggtggtgcgcaccctggagaaggccggcatcgcctgcgtcgagtaccacgggaacgtgcactcccaggcgaagcgccaggaggccatcgacctgttcaacaacgaccctcgggtgaaggtcttcgtcggccagcccaaggccggcggcgcgggcctggacctctcggcggcggacgtcatcctctggtactcgcacacgttcgacctcatcgagcgggaccaggccaacgagcgggccacccagatcggcggcaagaccgtcaccatcagggactacgtcacgccggcctcggtggacgagtacatcctcgccaacctggagtcgaagcgctccatctccgaggagctagccggaagaggcctgcgcgaccgactgctggctctgttcagacagcagctgtgatactcccggccggacgtgcgaacgacggctccacgacaattagcccggcgttaaactacacccactgacgcacgccgggcaagccgcccgaacgggcggcgacagtccaatcccaacacctatctctgaaggagagatgcagatgagcgaagacaccagcacccagacctccggcgaagcgaccgagaccaaggaccaggctccgaaggccccgggcgtcggcgagatcgccaagggcctgatccgcgacggcaagaccaacgaagaagtgctggctgccatccgcgagcagttcccggaagccaagacctccatggccagcatcaactggtaccgcaacaagctgcgctcggacggcgagaaggtgccgaccgcccgcgagctgaagggcgacgccaaggccgaggccaaggccaagaaggacgccgagaagcaggccaagaaggaagccgccgagaaggccaaggccgagaagaaggccgccaaggacgccgagaagcaggccaagaaggaagccgccgacaaggccaaggccgaagccaaggcccagaaggaagcggacgcccagcgcggcgagtccgccggcgacaagggcatcttcgagtaatcaccgaagcggccgggcagttcgcctggaaatgatggtttaaggggcacggcccctgccataagatagagggacctggtgcagaccaggtccctttctctatatggacgtccaccatgctgccagccaacatcgtcttcgccaaggtctacttcgtgcggggcggcgcgcccaacttctggaagcgccggtacgagatcaccgacccgccgaccagcggcttcgcccacgtcgtggtgattaagggcgagaagcggtccaccatcctctgcccccactccctggaggccttccaggtcagcaaccagtgcggcgagctccagacggcggagcgcttcgacgtcgagccgtccaagatcgcgcaccacatcgagaaggcctgggagacctgcgtcaagctgggattccagaaggactacggcgtggccgccatggtgctcaccgagatggggttcccggtgcccaagttcctgcccccgccgcccgacccgtccaagtccgacgactccaagcgcggcggcaagccgatcgtcgaggactccctccgcccgtgccgccccgagagcaagcgcggccaggtcgccgccttcttcctgcacgacgagccccagtcgcttcatgaggcgatggcccgcctcgggctgtcccgctccggggtgctctcccacctgttcaccctcaaccgcgaccacggcgtaggctacgagctggtaaacgactgcgcccgcctgctggtgcccgagggcttcgacctgttcgcctacgtcgagccggtcaaggagcccaagccggagaagccgcagcgcctcaacgaggacggcacggtctacgagcccaagaagcggacgagcggcaagccgatcaaccaggacgcgctccggccgatccccgagcccggcaagcgcgccacggtggcccggctcttcgtctcgggcttcttccctatcgcggacgccatggcgcagctggacctggaccgctccgccgtgctgtcccacctgttcaccatcaacaaggagaacgggctgggctacgagctgagcgaggacagccagcaggcccgcctcctggtgcccgagggccaccagtgcttcgcccccaagcagccgcgcgccaagaagacggcggaggcctgagcatgggcatccgcgtccagctccgcccgcacaaggagggggtggcggccctcgagcgcgacgggttccaggtggagcccgtacggttcagccggggtgaccacctcatcgtccgcgtcacccgcggcggcgcgtcctgccaggtgacgctggccggcagcccctcgggccagttcctggacgccctggtctgcgccgcccggcggggcatcagggaggctgcggcccgatgaacgaggtgcgctggagggtgcgccgccacggccgcctcctgagggtcgaggcctgggagggcgacgagcccgaagcgggcgagctgttccaggagcggctgagggagacgccgttctggatgctggtcgcctgcagcctggtcaacctgacgacctggcggcaggcccggcccgcgctcgaccgcctgatggcggactacccgagcccggaggcgctgtcccgggcagagcccgacgacctgcacgacgcgcttcggcccctggggctgtggcgccgccgggccgtcactctcaccaggctcgcagctcggtggctcgaggtggacccccgaagcgtcaagattgagtccctgcctggctgcggcaagtacgccgccgacagctgggcgattttcgtagacggcaggaccgacgtcgacccgacggacggcaagctcacgtggtaccttcaacaactgaggaagcagcaagatggatgagatcgacacgaccggcccgcaccaggccctggtagcagcactggtgagccgcatgctcctgaaagcggagcagttcaacgtccagatcctggacacgcccatcccgggcaccccggagatcctgtccagcatccgcatggacgcctcggtcgacgccctgaacgaggagatccaggagttcaaggacgcccacgctgacggcgacgtgctcgaggccgccgacgccctggtggacctgatctacttcgccctgggccgcctcgtcgagatgggcgtgccaccgctggccgtgttcgacgcggtgcaggccgccaacatggcgaaggtgcgcggcgacctgtccaagcgccccggctggaacggccgcgacgccgtcaagcccgagggctggcagccgcccaaccacgactggctgctcaccttcgacctgtccgacgtggcggagctccaggagctgcgccagcaggcccagggccgcgaggccatcagcccggtgtggctggagctgcagcacctgcgggagaccaagggccaggactacaacaacgtcccgggcgggcgcgaggcctacttcccgttcggccacgagtcctacgcacacatgctccacaccaagaacctgcgcatccagtcgctcatcacggctatgcgccagggccgcgagcccaactacgagggcctgtacgacaccgcccgcgacctggtgaactacggcacctactacgccgagtggctgaagcagcagggcctcgggggcgcgaagtgagcggcgtcctcatgccgttctacgacgtctacggtgcactgatcgcctgggccttcagcagcccgatcgaggcgaacgagcgcaccggaacgcgcgtccacgtcggccggggaggcacggcgttccgcgtcgacctgagcgacggcctcctgccgaccgtcggctaccgcaagaccttcccgcggtccgccgcggcggaggtcgcctggtacgtgcggggcgagcaggacgccgccttcatcaccaggtacgcgccgttgtgggacaagtttgtcgagccgatctacccgcagactcctgccggcactgaggctaagtcgggtgtcgcattcccgggggttcgctctgcttacggctaccgctggcgtcgccacttcggccgggaccagctgcggctcgcggtcgaggcgctgcgcaaggacccgacggaccgcaggtgctacgtgtccgcctgggacccggctgaggacggcctgggcgcccaggggcagaagaacgtgccctgcccggctagcttcaccttcagcgtgacgggcggggagctgcactccagcctgttcctccgcagctcggacctgttcgtcggcctgccgtacgacgtcatgggccacgcgctcctgatggacgccgtcgcccacgagctgcgcatccggccgggcgtgatgcacgtgacgctggcccacgcccacctgtacgagtcgcactggcagatggcggcggagatgctccagcacgagcccgtggtgccgcagctcccgctgccgggctggacgctgagccaggtcgagcagcaccccgacgactacgtggtccgctacgccgaggaggcgaagcagcaccagtggcccgcgtacaacccgaagcccgaggtcattgagtgatggaggtgccgaccaagcgatcccaggaacagtgggatgggttcttctaccgcatggccgtactggccgcggccatgtcgaaggacccggaccgcaaggtcggcgccgtcctcgtgacgcccgaccggcggcaggtctccccggggtacaacggcttcccgccggacgtgcccgacctgccgtcgctcctggccgaccgcgccttcaagctggccaacatggtccatgccgaggacaactgcctccggcaggcaccgttccccacggcgggctgcaccgtctacgtgacctcgttcccctgcctcccgtgcgcctgcaagctgagggaggcgggcatccgccgcctggtggcaccgaggcccgacctcggccaccatcggtggggcaagtcctgggccacgtcgatcgcggtgctcaccctcgccgggatccacatcacctacctagaggagtacaaccaatgcgactgctgctagcttcatccatcgacggctacctggccagcggtgccgacgacgacatgcgctggacaggcaagacggacaaggccatcttccgcctgctcaccatgtcgaacgccaacgacgtcctgctcgccgggtcgacgaccttcgaccagatgccccgcctgccgaaccgctccatggttcgcatcacccgcgcgcccgacgccgagaacctcggccttggcaagtccctggggcaggcccagctggaccacccggacgcatggctcatcggcggcccgaccctggcgctcgccgcgctcaggctgggctacgtgacccgggcgttcatcaccgtcgtgccaacggagctcggcggcggcatgcacgccggcgagctggccgagttcctgcccaacaacggcgacacgccggtgcagatctccgtcggggacgtcaaggtgcgcgtcttcaccgaggacatgaagtggcccgggaggtaaggctctgggagtggctgcgggaccggctgaagggcaccgccggcctgcacatgcggcgggtcgagaacctggtgagctcgggcgacccggacgtggacgggtgctggaacggcctgtacttcgagctcgagctgaagggctgcgaccggcccaagcgcggcggcaagctcggcttcgaggtcaggcaggcccaggtcgtgtggcacaggaagaggtggcggtgcggcggcaactgctggatctacgcccgggtgggcaagggcaccgacgtgcgccgctacctggtgcccgggttcaaggcccaggaggtggccgacggggtgaccgaggaggagctggccgccatgtcggtgctccgcccggaccacacgccccaggaggtgctggagtttgcgacaaactcattgggcaatcgcagcatgctcgcctagctggaacgatggtgttttggctcggaacgtaagcgcatactgactccgtgctccaccactggggcatgcgacaaccgggcgacgacccggaccgcacactagaacgaaggagaatcagtcatgccgaacaccgcccgcaccatcaaggaggaggtccgcgtcctgggccgccgcaagcgcgccctcacctacccggcgatggtggacatcatcaaggcccgccacccggaggcgaacacctccgtcaagaccgtccagtggtacgcttcccgcctccgccgcgacggcgaggacgtgaacgtcaaggacggccgcaccaccagcaagcccaccgtgcactgagccacggccggggacaaccagtgtcaggggacctgaggggcctccggagacgtccgggggcccttctctttatatgtacggcgcccaaactggccttcgcgaaactttagcaaaataatttgctggagggggctcccatttgggaaaagaccccatataatgacctcacaccaacgcaaacacgtgaggcacgatatgttcgaggtcaagtttggcggtaagcgccacccggcggcaaccctcgccgacgcatccaagctgttcaccgcatggattgatgccaacgacttcggtgcgtccgacctcaagaagtccgacggcttcctctataaggagggcagccgcgcctactacggctacgtctcctacaacggccgcacttggcgcggcgtctacggtcaggagggccacgtggagatcttcgaccgcgtgatcgagaccacggcggactacgtgcctcccactgaggaggcacctgcggccacggtcgccatcgcgaagccgaagaccatcgctgacgtgatccgcgcgggcatctcggcgggcctcgataacgcggcggtgctcgccgaggtcaagaaggccttcccggaaggcagcacctccgccgcctgcgtgtcctactaccgctcgaagatgaagaagtcgcccgccgccaaggccttggcggcccccacggaagcccgcaaggtcaaggtggagctcaagtccgtcgagtacctcgtgaaggagtggcgtcagggcttcaccgccaaggtgtacgtcgacggcaaggcctactgcaccgtcatcgacatggacgacgaggcgtctccccacttcgagttctcccgcatcgacgcctacaagctgctcgacattgtggagctgcgttcgatggcggctgacatcctcgcgaagagggagtacgaccgcctcacgaagggcaaggtctgcatcatgaaggactccaagctgtacaccatcaagggtgccagcgaagagctcgtccgtcagaagaaccccaccgccaccgtcatcaatggcatgaccgttgcacagttccgacaggtcctcaagactgttgaagccgcacagtaaccccatcattcaagcgcggtagcccaagtgttgggactatcgcgcccacaacccgccataatggaacccatcgacggcacgcactgcgtcctcgatccaaccgacccgtccaaggagatcaccatgaacctgtccaacgaatccaacatcgcagacatcgccgcccgccacaacgagctgagcggcaagggcgccgaccccaagagcctcgcgaagcgcggcaaggccaagctgctcgagcagatcgccgcgatggaggccgacaagactgaggccgccatcgtcgagctcgccggcacccccacccccgagctgtcggagaagatcgagaaggcgaaggaggagcccaacggcctggccatgctgctcacgcagatgaccaacaaggcctccaagcccgccaagccgaagaaggagaaggccgcgaaggagaagaaggagaaaggccccgtgatccgcgtcgtggctgagggcctgctgctcgaggtcatcagcaaggacgaggacggccgcccctacggtcactcctacgagaccatcctcgacaagatccgcgagcagttcgacggcgccaagacctccgtggcatgcctccgctggtatgccgtccacatgcgcgagcgcggcgagaaggtgccgaaccgcccgcgcgcccagcccaagaaggagggctaatgtcacagatgagaacgtacatcgtgggctccgtgcaccacaagggggcccgcgaggcgatcgccgacctgaggaccgacgaggtcctcaccctcaggcgggagccgcacaaccagtacgaccgcaacgccgtggccgtgtacgacgcctgcgggcagatgctgggctacatcccgaggcaggacgcgcccgccgtggcgaaggtcctcgatctcaagctgcccgccgtggcgaagtgccgcgccaagggcaccacttccgtagagataaactgggagaccaaacagtatgagcagcaaccgtaacgacacgatcgacctgctggcccgcctcctgtcgggagacgtctgcccgcacgagattcagctgcagcgggtgaccgccctgctcggcatcgtggcgtcccgcacgcccggcggcctggtcgtgacccgcgaggagctcgagcagataggcggcaagttcatcggcatcgagcaggaccccgactccggcgagatccgcatcaccgcaggcgagccgcccgccgaagcgccccagcccacccaccccgcgccggcaacccgccagtaacggccacggttcaaggagagacccacatgccccgccactacctagcacaagccctctgcgtcctcgccgtccttgccatgggcgtcctcctcatcaggacgttcgcgcaggcgctcgaccgccccatcgtacacgtctcctggcacaccaaggagtgcgtccaggtcgaggaccccaaggccgagtacgagggcaagaagtccgagtggagctgcgagcacatgccggaaaagtaccagcgcgtgtgggtctactgacggcgtcgaccgcgccggggtcacgccatgatgcctcccaggaactgtccctgggaggcatcatcgtatgtgcgagctggatgagggaaatgacgacgggctgcgggccgcgaggggcataaccctggcggtcgggctgagcgtggtgttctgggccgtggtcgtcggctcggtcgtgctcgcccgaggctgccacggcgtgccttctgggcattccaggccggccctggcatccaaggcggcctaggcccggggcctaggacgagtcaggccgcccgaaggcggcctgactgtctgagatccagaaaaagccaccgcccggaggcggtggaaggggatgcctggagaaggaggaagccaggcacccgccgcggggctcacttgctgaagatctccttgacgcccatcacaagggcgcccaccatgcctgacacgacgatgccgagcatggtcagcagggtcttgcgcttcagggtctcggtggtgctgcgccactcgcgcaggtgctggaagtccttctgcacctcgatggggtcgtcgaccttcaggccgagcatgaggaacgtctcccgcacagcctcacgaatgagcgccctggcctcgtctggggtgagattgtggagctgctgctccgggccgggcgtctgtgcggtcacttggattccccctggggcttgtcggtctggcggctgtcgcggtagaagtcgagctgccaggaggcctccttagcccagcggatcgtctccgccaggttgcgggagagcgactcgtacccccgagccgttacggcgaagagggtctcgccgtcgacctggaccagccgccactgtacggactcagtccgtacgggctggggctttggcaggacgggcagcgggggctgcttgggctccgccggcgggtccaccctgggtggattgctcgagcaggcggaaagcatcagcagtgccagcattgatgcgagactgtatgagacccggcttcgccctggcgagcgcgccgaggtcgtgctttgacaggacatccgtcagcttcctcgtggtttcgccagcctcacgctggacagtggagaatcgttcgagcgactccgcctggatcttggcggcatcatcccacttgtctatggcgagttccagggcgtccgccctggccttctccgccgccttgccctgctcgagggctgcaacctgggcgctgagctcggccttgtcctcgaccaggccgtcgtaatggcggtatgatagcacgatggtcgtgaccaaagcaaccccgataagcgcgccagcgccgagcttgtatcccaacggaatcatgtcaccctcctaggggtagatgttggcgggcagctcgaagtgaggcccgtccaggaacgccttctttcccatagccttgcggcggcccacgtactcggcgacctcgtcctcggggtcggccaggtcggccagcgcgcggtcccagaccccgccccagcggatgggcacgttcagctcgaggctggcctggcgtaccgccatggcgaccttgtagcagagggaccagtcccaccgcagctcagccttgccgtccccgtcgaagtcgatcagcggcacgaggtcgaccgcgtggccgaggccgtcccggccgggcaggtgccgcgagtccatggtctggctggcgccgcgcgccaccagggtcgcctggcgctccctggtgcgcaggccctcgtagacctggaagtccacgccggtcagctggattgcgcgctccaccaccttgacgaggtgggggtgcacgcccctcaggctggcgcgcgacttggtacccagtgcgaagctcatggtatgtcctccattctctgcgatgcccctggtgccggggcgggcttgccggcattccctgccggggtcttcagcttggctcgggccagggagacgtcctcccaggtggcgccgaacacgtaggacccgacgatgctgatgagcgtcaggaacgccatcgtgattgccgtgtccgccggcccggaggccaggttcttgtacagcacgtacccgatgacccacatgcagaaggccgacacggcgaacatgaagcgccgccgcaccctccagctcgacttccagttctcgttgcggtcggtcacggcgtaatctccgtccatacgaagtcgcccccaggcccggtcggctgaccgaggtaggccctgttgctgaggaaggcgggcggcgtgacgctgcgccaggcggtgccgtccgagatgttggacgtgcccgcgccgttcggcgacgagctgcctggcaccgtgccggtgacgaccgtgatgctgccgtcgttgtagaggccgacctcccacagattgtcgttgctgttgccagtgttggaggagccctcgtatcggatcaggaagcaggcgccagacagcacgggcccggcgaagacgttctggtaggaccggtcggccgcgttgatgagcagcgcccgtcccgggttggtgggcgacagcccagagtacgcgctcgacccgaagccgaagtccacgtggctgttggagctgatgtagatgttgttctggaacgtcaggccgaacagcgggaactggaacggcagcgccggcagcacggtgttgctgtcgtccacctggccggaccagacgttgttcaggccggtacggccgttgagcgtgttcaggtagccgataccgccggcgacctcgccagaccaggtcaccgaggccgtgccgtagatggagccggtggcggtgatggtgaacgagtaggcctcgccatcggtcgtcggggtgccagacagcaggcccgaggagctgagggcgactccgtcgggcagggccccggagctgaccgagaacgccggggccccgaccaggtacgccgtggtgagctgcaaggacaccgccacgtcgacggtgaagctcggcgcggtattgcggatgcggcccggcacgctcggcagggcctgcagcctgtcgaagatcagggcgttctggaccggggcaccgtcggggtcgaaggcgatcgcgaagaacccggcggtctcgggcagcaggttgccgaccctgaaggatccgtccaggccggtcagggccgcgccggcgggcatgccggtccgcctggcgtacaggcgcaccaggcagtttgccagcggcgagtccacgccgtttagcctctgcttcaccgtgccgccgaccgcgtacaccgcggccggctcggcgccgacgggcctcggacctccggcccaggacggggtgcccggcacggccgtcggcaccctgtagcgcacgaagccccgccccatgaggggccgaggtgacggcacggccgtctgccgcgccgagggtcgggcgtagctgctgtaggccgaggggttgggcccgcggagcgaccccagcccgtacgaagcgccaattgcgcccaggtcggccacggtcagctccaggtgtccgaggtctcgatgacggcgcgaccctcgtactggcggaacgccaggaaggtcttgccggccaggtcgccctcgccctggaaggtgtcgccggtgttcagcacgtactgcagcggggcccacagcccgggcatcttgccgagcagggccgccatgttcgtgccgcccggctcgtggatccagaccggggacatcatcagggcgccgtcggggccgtgcgggtagctgaggctgccgttgcctccccagttgccggagccggacagcgagtagtcgtggcggcggccgagctgcacggggccgcccaggccggtgtaggacctcacggcgtagaggccgggcgcacccgagctgacgctgtacgagacgaagggctcctgttcggaggtggtcgggctgctgctggccttgccctggatgcaggtgttgaaagtgttggcaggggagtacgcgtcgtagtccccgaaccagtagaactcccggtactgggtattgctcgagccggcgtccgggtagttctggaggtacaggtacatcatcttctcgttcgcgacgagcacccacggccggccggccgaggtgctgccggtgtagtgcacgtgccagtacagaccgcccgggatcaggtcgttggtgggccagcgaccgtcgcccgcatcgatgccggtcatggtgtccatgccgtacacgcgggcggcgtacgtcgacgagcctcgggtgtcgtccacgtacaggtaccggccgcggctgcccgcgccggtcttgaaggccgcacggttggtggcggtaaagggcttggtccagccggcgccggccttggagccgtagccgtcgaccaggcacttggtgagcaggttgagcagatcgccggcgttcgagccggtcagcacgggcgcgctcgggtcggagctggagtacactcggacggtcatggggtttcctcagatggttagtaggatcatgaagttcgacgggagcgggtccgtcgtgcccccgccgccgtccgtgccaaatacgaagcccagggtcagggcctggggcggatcgtacgtgccgtcgaacaggaacggcacgctcagtgcctggggcggctggtactcgtccatgggctatatcccgggaacgatggagaccaggtcgtatcgtgcgtcttcaccgtcgtagacgaaaccaaccttgtccgcgcgcgacccggtctgggtcacggcgtacgcctggatcagggagttgaaccggaccacgccggagggcagcccgacctggcaccctcccgccggcggctggcgcagcttcaagacgcagccctggccgtcgatggccccggtgaagctcagcaccaccgtggccgtgagggagatccggatctcgtcgtactggccccagtcgcactcgaaggtgcctgcgtcggtgtcggccacgtgctggatgcggcgggcgtacggcgtgccggggttgccggggtcgcccttgtcacccttgtcgccgggctcgcccttcagcgaggccagccagtccgggatcgtgccgacgaagccgccgtcgacggcgatctcgtaggcgctcttgccgtcggccccgtcgtcgccgtccgcgccgcgcaggttgtccagggagaccaggttgatccaggacgtgtccccgacgtagttccactggatgtacccgtcggccgcccgcagctgcaccggcttgccgtcggaggcgaagaagtcgagctcgctccacttcttggtgccgtcgccgaccttcagcttgacggcctggccggggtccagcaggaagccgatctcgccgttccagaggaccgggtccttgctgttccagttcgccgacgtgtcacggcgctgggcaaatcgctggggtactacgatggttgccatcaggctccgcctccgtcaaagatgacctcgtcgggggtccaggtgcccgccgtgatggtgctctcggtcgtcccgactgccgccgtgtaggcgaaggtgcggcggtggcggttgatgctctcgcccgcgtcggtgatcgagtacagctccatcgtgacgttgccggtgtacgccaggttgccggtcgccgaggtgccgctgatgttatcgcgagcgaccagcaccgcgccgccagcgtccaggaacctcatcccgtaccgcgtcccggtctccgggccgatcgaggcggcgtcctgggtcggcaggacgtcgccggtctgctgcgtgcggtctcggtgcgcccaggtgacggacaccgggccggccgcggtcgcgggcttcctggcgccgtcgacgcgcaccaggcccggcgggtagggcctcgcctgccgcgccaggatcggggtgacgtcggtcggggccgactccagggcgagctggccccgggccgcgttcgtcagcagcttgacggacacctgctcgccgctggcgtactcggtcgagtccatgccggtgtgctcgccgccctggcccagcacgatcaggcgggcgccggacgcgaccgggagcggcagggagtccagcacgccgcgccggaccgtgacctgcgtgtcggtgaaggagacgatctggacgatctccttggcgttcgaggggccgtagccgatgaccgccaggtcgcccgcctcgacgatggtccagtcggtcgtcgcacccagggccatgacggtggtctcggggctgtcgtcgtaggcggcgctgatgacggcggtggggcagaagctcaggtccgtctggtcggcgtagcccgcgccggcgctgacgtacatcgccatgttcatcgaggtcccgccgggcgagacgcccgcggccagggcgtagccggccgtcttcggcagctgctgggcctgggcgtcgccgatctcccggacgagcaggtagtacggggtgtccatcgccaggcggtagggcgacggcagggcctcgccgctcgggggctgccactcggagggcggcggcggggcgtaggacgccgaggtgagcgagaacacgtcctcgacgacggagagcttgatctggttgctctgcagctcgcccagctcgatgttggtcacccggaaaacgatgttctccacgccgtactccgcccaggagaagcggaacacgtcgccgatgttcagggacgccgcggcgcgggtcgcgtacagggtggcggtggccagcggggtggacagggccttcaggtcgcgggcggcggccacggtcgcgatcgagccgttggtgaagcccgggtactggatggtcgtgccgaccgtgctgccctggttggcggctagggcgatgtcctgcacggtgatggagccgtccttgccggtcgacttctcccagtacgccacgctgacctggttggtcagctcgtcaaccgtgcggcgcttgaagtcggagacgcggatcacgttctcctcgtccagcaccatcagggtgctctcgtcgtacccgcctcgggccagcttgagcacgaagcggccggtcgaccggtcggtgtacagcgagccgtcgatgtggcggagcacgatcgccaggaagtcgctcaggtcctgctgggtgtcccagagcagggacatgcccatggactccgagtgcagctggtcggcggccaggcggaacgcggtctcgtccatgtcgccctcggggtagcccatgccccagtccgggtcggtcagcacctcgcggacgatgtgggccgggttcatgtcgccgtcgccgatctcggccttggcgtcgtaccactgggccaggccgttctgccgggtgtgcacgcgggtagccctgaaggcccagagcttgaggtacgggttgttgcccaggtagacgcggcggagcaccacgcccagtacccggcggaaggccgggattgcgccgccgagctggccggccaggtaggtgttggcgacctggtcgtccttgcccatcatgacgtcgaccgtgccggcgctggccgcgatcggcgtggtggacgggtccagcggcgggtcgatgcggtcgccgtaggacttgttgaggtagtccagcatgaagccgccgatgccgccctcccgctccttgccgccgaacaggttcggggcgcagaccatgatctggccgccggtcgagctgcccttccaggccagcttgtcgtccacccggatctcggtcagcttgtcgaccggcccgtggcacaggaccatgtgcatgcccaggaagtacttgtacccgatggtctgcttcttaccgccgcccatttttggactcctctacgacggccagggccatgccgtccccggtctccgccagcttgtctgcgtcgatgccgtcccggaggaaggcgctgtagtccagcccgtggcgctggaagaatgagcgaacgccggcggagcagtagcccagccggcgcatgtgttccatccgcaccacggcgcggtcgtccgtcacttcttgccgcccttggccttgatggcctcggtccggaagtccccgtaccagcacacgttggggcccttcaggtccctcgtgccgaacagcaccgggatggcccgcccgacctcggccgtcggggcggtgatgtccccgaggccggccggcttggcgttctgcggcttgggcatcatcgcgtaggacgcgacgagggccacgatgaagactacgatataccaccaaatcatgctagtaacctctcagacgatggagcttccgtcgaacgggttgcgcgtcgggatccacgggaacccgccgaagttgggcaggttgttgaacttggcggcgcacgtcgtcttcaggtggttgcagcccgggtacagcctgaccgcctggtcgcccgcgaggctggccagcggcctggacagcacgaccgtgccgccggtgtggctcacgatgaagcgggcagcgccgtcgggcgccaccaggatgccgccggcgaaccacccgtcctcgtagttgccctcgacgcccgacaccacgacgttgaggccctggctcatgccgatgaccgtgccgttgtgccggtagctctcccggttgacgttgcagccccggccgtacagtacgtggcggcagccgtactcgaacttggcgcgcagccccgggcggcggatcgaggtgtagaccggctcgcactcgaggtcgatggcggagtcggcggcagaggcgctgagcacgcgccccttccagtagatcacgaactgctggtccgggtcgccgtagtggccgcggtagatggtgagggaggtcacctcctcgggggagaacccgaggaactggctggcgaactcgtcgtcccgcgggaacttgaccttgatgccgttcttgaagatgtccgtcgactgcttgacccggtcgcgggagacgctggacggcttgtacaccacgccgtcccgcaccacctcgaaggccccggaggcgaaggcccaccgctgcagcccctgggtgaactcgtacagctctaccggcgccccctgctccctggaggcctctatcgttgcgtagctcatcagtctccctcgggcgtttcgatgacggggatcgtgctgctgcagcggcccgcgtatgagtgggtgatctcgacgctgtcggagtccaggcgcacgtggcgcatgaagcagagcaggtcaatctcggacgtagcgaagcccctgccgaagccggcagcgagcgacagaacctcgttgccgtccgtgtcggtcgagccggacagcacgcggttgtacagcaccgtgccgtcggtcagcacgagcatgaggtcggtgaccccgtagtagagggggtagccgatcgggcgcaccgtcagggcggtggcggccgagtcgacgttggtgagcacctgtaggtcccggttccagctcggcagccagaagcccttctgcttgccgcggcgggcgtggagccaggtgcggtagcgccaggcctcggccctcgacagcgcgtccagcccgatggtctgggtgctctctgggtagccccgctgcgggtcgacggtgatcgggccggacccgttgtcgaactggtccaccggccggatgatcttctccgacaggtcggacagcatgactgacctgtccatgagcacgtcgcgcccccggtactgcggcagcccggcggacgcggccaggtccacgttgttcgtcaccaggaactccacgcgggcctgggtcatgtcgtcgggccgacgggcgaactcggacccgttcagggtgcgggcgtaccggagcggcatcacgtaggcgttctcgaaggagcgcccggtcgggacctttagctccaggccggaggcgtccgcgctcagcacctcgacggtcagcagggtctcgtcgtcctgccacagcagggcaatgtcgttgttccggtagtcggcgctggacgcgtcgaagtcgaggcgggtctggccctccaggacggtgccgaggcgggtgacctcgccccagaccgggacgccgtacacccggtgggcccactgcgtgctgatggccttggcccgggagaactggtgcgggtcgagctggaactcgtacaggaagcgctgcctgggggccgtgcggagcgccaggcgctgctcggacgagtaggcctgcagcaggtccgtctgccactccagggactccctgaacttcgtctgggggatgaagggccagagcacgacgcggcggccggagagccgcagggtcggctcctcgtcgccgaagtcgaagacgtactggcccgcgatcgtcggcgcgccgttggtcgagatgctgacctggtagatgcgggactccagggcgccgaacgtggtcggcggcgcctcgggctgggtcagcgtcacgccgtccaggccctgggaggtgatggcctccagggtgcggccgtcgaagtgggcgttccagacctctacggcccgcgtctggctggacagcaggttgcccaggtcgatcacgccgggccggatgtgcacgcgatagtacaggtcatccacgaagccgccgacgcggcggtccgatccgaaagacggaggagcgagcacggcgacgggcggcgccggcggcagggccagccgcgaggcgcgcgagtgcctgggctccacaatgggaaagccccaggggtaggtccatgcccccagggtgctcgaggtgtccagcgccgaggcgtccggcgtcggggtcaccaccctcaaaacgccggtcatctgcaccactgccatgtcaggcctccttcaggatggcgtacccgcgctggccggtcgcgccgcccttctggtagtacgggaagaccttccaggtgtcggatccgagggtgaactcgtcgccgggcacgtagttggtcatctccagccggcgcatgtgggcgatctcgccgtagggcgaggcgaactggttgccccggccgatgtacacggtctggcgcagcagggccgtctgccagccgagagcgctcggggtgtactggcgcaggccctcgtcgtagtacgactggccgatggcggccagcggtccgtaggtggacgtgtccgccgtgtacctggaggcggcccagccgttgttggagtccacgttgcatcgcacgaagctggcggagtcactcccccgctggtagcccatgcggaacgggatcagctcgttctgctgcgacgagtccgggccgtagccgctctgctcgtagtacgcccaggtcggggtggtgctcgtgccgccgaaccaggcgccgcccagggccgccgagctgaacttggagaggctgccgaagcccagcatctggaagcggccggtgcggtactccacgacggcgaagatgtcgtccgagtcggagtaggagaagaagtggtaggccggcacggcagccgtcatctccgagatcatgcagccccgggtgtagccgttgtagctgggcgcgccgggctggcggaatgcccctcggccggtgtccgcgccgtcgtacccgtcggccatgctgagcgccaggcaggagtaggagttgctggagctctgggtgtacccgttcaggttgtcgttgagggcggaggtgccctggtgggagcacaggccgacgaagagcccgttcttctgcaggttgaggcgcgccgtctggcccacgccgtcccaccggttgacggtccagcctgccgcgatgcagaagagccggagcttgtccagcaggtcggcgacgctcgttgcggccccggtctcgtatgccatgtctatgtcactccgccttgagggcccagtactcgcgtacgtcggttcggtaggtgttctggaagaccacgtagtcctccccttcgatggtgccggtgttctcggagccgttctggaaccccgagatctggaagcagccgtccagctcgcccaggaaccgccccgacggctggcgctggaacagggtcgatggcaggacggtgaagccgccgccgacgttctcccggatgccgtagccggcgctgctcgaggagttgttgccgtcgaacatcccgtgcggcagcacggagccaggggagctggaccaccgggagtacgactcggactgcccgccggagctcggcctgttgtgcaggtcgaaccaggacccgtccggcagcatcacgttgagggtggtgctgaacgccgccacttcgctggccgagacgctgttgtagctgcccggcatcgggaaggcgctgtgcgcggccgacacgaagtcgtaccggtagctgtccgagcggggcgacatggagccgccgatcgccatcgggtacgggtactgctgtggcgaggcgtagggcaggaagaacccggcgtaccccgcctcgaagacggtcgacaccttgaacacgaacaccacgcggcggccgctgccaacgaaccagaagggcatggaggcgccccagaggggcacgaccggccacccgctcgggtgcaggccgggctggcggtgcggggactgctcgttcggcaggtagccggtcagcccctgcaccatcatgaagtactcgcccgtgccggtgttgtagctggtgcggaaggccgcgaagatctcctcgtcgcccgccaggcccgggcccttgaccaccaggtaggactccgaggacgataccagctccgagccgtcgtacagccacagggaccggagctcccactgggagccggtcagggtgccgccgtagtcgccggtctgcttggtgaccaggcgccaccacaggtgctcgcccgtggcggagggcacggtgaaggcgcgctcctcgttggcggtccaggcgcgctgctcggtgacgtccagggcggtggaccacgcgctgccgtcgtccgagtactccagccggaagttgcgcggcgtgtagttacggacgttcgagctctgcccggccttgagggtgaaccgcgtcacggcccgcgctgcgcgcatcttcaggcgtacgtactggtccggggtgaacgacgtcgacgacaggtactgaccgttggcgtcgtcgttgtagttctgggtccggaagtccggccggaacatgcgatggagggaaacgcccgagctgaacggcagggtcgtgtccacggagtccaggttgtcggggacccaccgcagctgctgccaggtctgcccggcggctaccaggctctcgttggcggtcaggaacaggcgcagcttgtccagcgcgtccacgtggttggcggccgtgcccgttgcgaaggccatctgaatctcctcggttagtagcccagcgagctcttgttgcggttgacgacgttcatgatgagcttctccccctcgtccgtgccgaggtagtcgcccaccaggctcgggtccagcacgttcacgttcttcacgtgcacctgcggtgccatctgcgcgggctggttgccgccgtccgggtatgaccggccggtcagctccctgccgcgcaccgaggcggggcccttcaccagctccgggccgtactcgccgacgatgccgaccttgccggccgggatctggccgccctggtcgtacgcgccggcgaactgcgccccgttgatctgggagatgatcgaggcgccggtggcggcgacccgggccatctcagccaggttggccgggaagcccagctcctgggccttggcgaggccggtcgagatggacatggcggcctgggcgacgctgaaggccttgctcacggcgaatagtaccttgtaggccttggactgctcgccagcgtaacccttggccagcccagcgaggccgtcgaacagcgtggccgcgccctgcagctgggtctggatgcgctgcgtctccatctgggcctgctcctcggtgaactgcttctggaggcggcgcagcaggtcctgccgctccagctccgtcaccgactcgctatccaggatcagctgcttcttccgctcgtaggactgcttgagcgcctcctcctcggtcaggagggagttgtacaggctgtcccgctcggactggcgctgccgctcggcgtcggccagggccttgtcgcggtccttgacgacctgcgcctccagctccgcccgggccttggagccctcggcggtgttggcgcgcaccatctccatgcgccggtcgtaggactcccggatggcgtcctcctgcttcagcagcgactggcgcagctgctccagctccgagttgccgtaggcgcccagcttcttcagctcggtgtcgcgctcggcgtcgaggcggctcatcagcctggtgcgctcgtcggagcccgccttggtgttggcctcgatgatcgccctgcgcttgtcgtaggaggaccggatggcctcctcctcggtctgcagggactccttgagccgggcgaactcctgctcccggcgcttggcctcggcggccgcggccttgtccacgcccgacgaggcgggcttctggcggtcgccgccgatgcggaactgtgccaggcggtccgtgccggccgccgccttcttcttggcctcctgggccttgtcgtactcctcgcgcaggcgcttggcggcctccagctgctcgttgctggacttgagggtcgcgtcgcgctcgtccaggatcgcagagatggactccatgcggacctgggagaggcgctcctgctccgccacgaaccgcttcatcgaggcggcgatggtgtcgtcggtgaagatggccttgatgctgtcccgccagaactcggcgccggcgatcatcctgtcgatgccggaggcgaactcgacggtcaggatctggaccatcgcgcgcaggttggagggcagctccttgaaggcgctgatgaggaagtcgacgacggactcgccctcgtcctcccactggccgaagttgtccttgatgaactgggtgacgatgtcgatggacttctcgatgtccgtgccccagacctcccactggacggtctgcgacttgagcagcgcctccatctggcccgacgcgatcatgtcggtcagctcctggagggcgtcggtcgcggtgcgcacggaggcctcgatggcgtcgccgatgccggactggctgatggtcagccacagctggtcccaggtgtcgcccaggttcgccatggcgccgtcgagcgagtccatgcggcgctccatcgcgccggcgaactcgttctcgcccaggtccgtcaggtacttctcgatctcggccgcgttgttgccgatggtggtggcgacgccccggaaggtcagggtgacctggtcaccctgctgcttcgccttgatgccgaactccttcaggcgctcgaactctccggtggcggcgtcggccaccgcctcgatcatctggttgaggtccttgcccatcgcactggcggtgttgccgtacgacatgagcgccttctcgctcggatcgaggcccaggttcaccagcttggtgaagccgtcgacggcctggttcaggtcgtagggcgtgttctgggcgaactcgcgcagggcgtcgaaggcgatggccgccttctcggaggagccggtggcggtgatgaggcccgcgttcagcacgtcgaactggcgttgcacgtccaccagcttgttcagggtgcccattacgctgacggccgcggccagcggccccagcagcttggtgaaggcccccatgaggcccgcggtggccttctcggccccgccgccggcggagctcaggcccttgagtcgcccctcggcctgctggacctggagcgactcgatcttgattgccagactggcgacgtcagttgccacggttgttcaccttccagaaaatgcggtcgagggacttgatgaggtccgcctcccagcccagcagaggcttgccggtcatctgcgaccaagcctgcatctcctggaaggtgagcggcaccccggcgaacacctcacggaaccactcccagatgtacccgagctcctccgggagctcgggcgcatcctccagctgaggcggcttgcgcttcagcgtcttccacacctgcatgagggacgcacgcagggtctgcttacttcccttcgggatcaggtcgagcttgaactcgtgctctgcgaaggctgcgagctgctcgacccggctgcgaaaaaaagggcgcgcttggacgccgcgacgtcgatggagtccatgatctggggcgcctcgacgaagaaggcctccacgttgtcgacggtgcacggctggtcgaacgaccaggcgaccacgaggtgagcggtgaggcggcgcttcgccttggcgatctcggccgcccgctcgacctgggagtcgagctgggcgatccggatcgcgtcccggcgggcctcagcgtcggcctgccggaacgcgtccgagtcgatgccgcggatgcggacccagtgctcgctcttcgtgccgtccgggcgccacagggggacctggatcccctcgttggcggtgccgcgggtgaagaactcgttcatgccagccgcccccgcggcgttgttattgttctggtccatggcttatgcgggcaccttgtcgatgatgatgttggactgggtcacgctgtccaggagggcctggaacggcatgctcagggtgatcgggccctcgccctcgacgtccggctggccgccgttgtacttgatgcggggcagggtgaagacgtacttgttgcctgcgccgtccgggagctcgaagacgatcgaggactcggtctcgttgatgaacttgtccagcagcagggagttctcgaagtacgccgtgatggtgcccgacacgttcgaccggccgatggacggcaggatcgacttcttggagcccaccacgaagcgcgcctccaggccgttctccaggttcagctggatctcggtgatgacggcgatcggcgtgccgttctcgttcagggtaccggtgaacgagtccagcggcgaggtggtcgtcggtgcggcgtaggtcgcgccggcgatgatggcctgggcggtggacatgtccgagccgaccgtgccgaaggtgccggtaatcatcgcgttggcgctgatggccagcgccagggtgttcagctcgacgccggtgaagcggtggtacggcttgtcggccgtcgcgatgtcaccgaagaagcgctcgacggtgaaggagcggcggaccgtgccggccttcaggcggtcgccgtcgccgcccggggcgccgtctgccacccaggtgcccagggtgacggcctccagcaggtcgtcgaagctgccgaacgagagctcgaagttgatgtccccgcccacctggcgtgcgccgtggcggaagtcggcgatctggcggtcgtcgcggatctcctcggactgcagggactccttggacaggccgagggtggtgcccgtgtggcggatgggcttgaacgcgggggtcgccggggtctgaccgtagacggtctcggcgacgtagcgcatggagtggcggctgccgtttgccatggtggtacgctcctactgtggattagtttcgagagacccgggcgaaccaggtgacggtcatgctcacgcggtaccagccatcgacctcgcgcccgcgtgagcggccgcacgaggccaccgtgagctcgacccccgagtgggcaagtcgcttgcccgccttgaagtagtcagtcagctcgtccgccttggccgtcacggccgcctcgccggtgttgagtgggtagttcaggtcgatctgcaggatgccgtcgtgggcgtcctgaccctcgttgcccagggtggcgacggagggctggttgcccatgatgaagaccgaggcccagggactctggtccgacggcttgtcgaacggggcgttcggcacggcgtagggcagggcgagcggggagtccttgaccccctgacgcagcgccatgtccagcccgctgtaggtgttggtagccattgtccgtccttacctgccgaatgcccgggccttggcggccacgatccgcttccaggaggccacgtgccttcgcaccatgccctccggcgcctgcttgctccacccgtcgtactcgatccgctcgacgtacggcaggttgttcgtgaaccagaccacgtcgaccagcgagcccaggttggcgacggcctccgacatggccgcgccgcctcccaggtcgagccggtcgatcgcggcccagttcggtgagttgatggtcgtctgccagttgccgcgcagccggccggtgtcgaccggcgtcgcgaagatcaccagcttgaagagctcgaggaccgaggcgcggcgcacctggtccaccctcttcagggtcttgacaccgaaccccttcagctgctgctcgaagcgcgccacgttacctccggagctgcagggcgaacagcagggccaggcccgccggatcgaccgagtcgaagtccacgatggcccactgggtgccgctctcctccaggaagacgtcgccctgcttcgggcgctcgaccgcctggatgtagaccagccggtcgccgcggcggatgttctcgccgtcgacctgcttgtcgctgtagtcggttatgacgccgacgaccgggaagtcggtcgggccggagcccggggtgacggtgccgtcgaccgggtcaacaacgaccgggccgcccggacgacggagcctgcaggactggccgaactcggccagcagcgcgtcgacgtcgtccttcatggactggtagtcgaaggtcgccatgtcagcccctcgacagccggccggagttgccggactcgacgaggccggcctgctgcagcgtcatggtgacctccgggaactgcggcgtcgcggccgccaggttggccccggagctctcggcgaacgtggtcgagagctcgatcggaccgaccttcttcgtcacctgggtgaccttctggccgctcgcgtcgaacgtggggtccggcatgagcggcttgcccgagagggcgcggttcgcgaccatgcagaccgccaccgtgagggcgggcggcaggccgcggaggaatgaggtgacgccgccccggggccactgggtgccctggagccggcgtcgctgccagcccacccaagagtaccgggcgtcgaggtaggtcgtcgcgttcacgatcgcctgctcgagctcggtgtccgtcttggcggagaggtcgacgccgcggtccgcccagtaggcgcgcacggtggcggggtcggtgtaggcgttggcgccgtcgaccgtgccgtcgttgtcctgctggttgaatgccatgggtcgatcctctcctgtgggtctgtcaggggcttaggccttggcggccttcgccttggcgcgggtgtagccgtcggcgatcgcgtcgacgtcggcgcgggacggcttcttgccggtcagagcctcgaggcgctcgaggttcggcaggttgttggacgtccagtcctggtcggcggccgggtccagcaggccgatcgcctcagccaggctcggcagcgccggcggggcgggcggctcctgcgtgttggtgttctggcccacggtcgcctggtccgcatcgcccgacggggcgaccacgacctcgcgcaccatcagctcgtcgccctgggtgaacaggtcgccgaagtgggagcgcatggcgccgaccacgtagtccgcgtcggtgttctcgcccggcagggcggcgatggcctcgtccagctgcttgcgggtcggcttgccgccctgcttggagcgcagctcctgcagctcggcctgctcggccggcagggcgccgtagaagccgaagacacgggtgaggctggcgatctgcccgtcgttgccggcgaactcgtactcgccgtcgacgaactcgtgaccgttgacgttcatggtcttgccctggtgcggtcccaccaggacgaagcgctgggtcttgctggacatgatgtccactcctttctcttggcctataggccacgaagccccgccggcgtaccggcagggcccgtggtgctcagttgacggtccgcatcgggatggcggtggcgaggttggcctcgctcagctccaccacgacagcgtcgctccagtagccgtccgggccggggcgagcggcggccgccgcagcgcgggcgtcggccggcttggtggtcgagtcgtccgccacccagacgatgacggcgtcggacttgtcgtacagggtctgcccgcagcgcgagccgctcaggcgtacgaggtgtgcgctcatgtttcctgtctcccattaagcgcccgccggcattgcgccggcgggctaaccgagatcagcgacgccggcggattaggccggggtcacgcccttcagcacggccaggcccttctcgctgaacagcgcgaggccgcagtaccaggagatacgggtgatgctctcgtcggcatcctccttctcgcccacgtacttgacgtgcatgcccgcctgcttctcggcggtcaggccggcgatgccgtgggtgcggctgccgtcgtcgaaggtgccggcgaacaccgaggtggcgttcgtggcggtgccctgggtctgggtgatcgggatccagtcgttgcggaagatcgggatgccgcggtaggccggcacggtgcggcccgacgccatggtgtacacgtcgcccggcgaggtgccgcccagggcgcgcagcagcgccaggtacttgcggcgggtgcgggagtgcatcatcaggtagtcgacctggccgtccttgtcggtgacgaggtcgatcagggcgtccaggtcctcgaaggacaggcccgcgccgttcgccgcgccgttgttggcggtgatggtctggctgcccgcgaccaggctgaacaggccggcgacgttgttgccggtgccgtcgccgttcaccatctggttctggtactggcggccggccgacttggccttggaggcgacctggacggcggtctggtcgttgccgtcgcccgagcgggtggcctggatcagaccgttcacctcggcgtcgccgatgatggtggtcagggtcgaggtcacctgggtgaaggtcgccgggttcttggcggtgatggtcgagccgacgccagccatctggacgtcgcccagcacgttctcgcgattgtaggcgagggcgttgccgtcgatgccgtcgaagggcagctgctcgaagatctcgttgacggtgatgacgttctcgatgacgccagcgacgagctcgtcctgggccagcttcgccgactcggcgagggtaacggatgccattagggttctcctgggaggcgggtggtgggatgcttgggaaaggtgccggatcgcccgacgattcgacccctgggccaaggcatcacgcctctgcagggtcagcgagcgcggcagggtatgaccgtgctcgcgtgctatggttcgggactttgccgtgacaacccgagctcgtaaccccctgaacgctggtccagcgcgagaatctgagcctcctgggcctccggaggcctgcctcagacgagaaaaagctttacggaccaaggacttaagccgtatctgagccgaaacgagccttcggcacgtcgttgtcccaggaaatcggccaggtcccaggtccggccacggctcgaggaacagccctagaaggtctagaaggcctagacggtccagctgcgacaaggacttagaggccgagctgccctagaaggagggtaagactgccttagatacccttatttctttagatctaataaaaagaataaaaatagttctataagggggctcccatatcccaaaagaccccgtataatggactcacaccacggcaacctggtaaacagatggaccgtaagccctcaaccaagatcaaggcaccgcgataccgacaggcctgccctcggcaaccgatgaaccgggaactgtggcgcggtctgtttgaagaggcacgcagcctgcatggcagaccgctcgaggggctcacgtccgtcgacgacggtcgagcgtggttccaaattgcgggcgacgcaacgccctactccgtcctcctgtctgaggacgaactcaagatgttccacctctgaggtagacatgaacaagcccaccaccgagaaggccatcgccttcatggcaaagaatcccacctacttcggctcggccggcggggtggacctgtacgagcaccccaccctcggcgacgagtcgcccatcatggctatcacggcggacggtcgcgtcaagcgcacccacctgtgggacatgtccggcgtcgagtccgaggccgacgagctgaggaacctgtgatgaccgtcaagtacaagaacctggaagacacgcccatcgaggacctcgcgcaggtgatgcagctgctgcgcgacctcgagatagcgcccaccaccgtcatggcctacgccacggcgctcgacgccatcgagacggcggaaggggccttcaccaccgtcgaggttgccctcaacgacaacgccatgatcgaggcggaggacatggacttgcataggacgatcttcgagggcgcagagtcgttcctcaaggtcatgggagagatgtgatggcggccttctcgtgcaacgtctgcggtcagggcttcgacttcggggactgccggtgcgactccctgcccgaccctcagccctccggcggactgccgtccgtcgaggcgctggccgaagccttcgtgcgcctcctgaggatgaacctcgggcaggacgtctacgacaccgtcgtggacctcaactccagggagctgaaccccgacgtgtgccactcgggggacttctgcgactccaacatggtgatggacgccgccttcggggagctcggcgtcgacccgtcttcctacggccgcgaggacgaggacgacggcatgccgcaggaggtctgcgacctgtggaacagtgcgtgggaccgcgccaaggtcctcatgcaggagcgccgtaccccctaaacagtggcattgtaccacctaattgggcgtcatgatgcccgtgtccctaccaaccaaggagagtcccatgaacttcgaagacctgtacctgatccctgacgactacctcgacgccttcgccgaggccgcgttctccctgatcgtctcgcgcttccgccagccgtcccacgccatcgccgtcaagcgcggctggtcgacgctggtgggcaactccgcccacccgacggcggccccgcgcggcggtgccccgtggacggaggccgaggagcgcgacctcctcgtggccgccgccggcaagatcaacctgaccaagctgtcgagggcgcacggccgcaccgagcacgcaatcgcctgccgcctggagcagctcggcgtggaccgcctcctgatcgtggcctccgacttcgagcccgtcgaggcgcccaagcctgccccgcccaagccccgcatgaccccgacctcgccagagtcccgcctacgcaccctgctgacgatcgccatgggcttctccagcgccgagcacgtccgtggcctgcccccgccggacatcacgttcctggtggcggacgacctgatcgacttcgacccgaccggcaagcagcccccgagcctgacggagaagggccgacaggtcgttgactccgtcgtgggccgctcgaccggccgtaagcgcgccgacctggcctggaaccccagccgcggaacctcggagatcactgacgggcgattctacatggtggcctccggcgacgtctacaaggacggctgcgcggccggccgacctgcgctgaagaacccgccgaaggccgtccacttcaacggcgccaccgccgacggagaggccgtgcgcctcgccaacctccacccggggacgcgcttcttcgtcctgcaggcggtgtccgtgcaccaggcccccgagcccgtgctcccgcccgcggtctcgaagcgagtctgacggtacactgtaaccccctgatccgcaaggagttttcccatgcaagagaaatacgaccgctacaccctgttctacggcggggtgttcagccagtggtacccgtcgcccatggtgatcgacggcgtggagtacggctgcgccgagcagtacatgatggcccagaaggcgagggtcttcggtgacgagcaggcgctggacgagatcatggcgacccagagcccggccgagcagaaggccatcggccgccgcgtcaggggcttcgaccgccgccagtgggactcggtgtcccgcgacgtcgtgatgcgggccagcctgcacaagttcaccagcaacccgaagctgcgggcgcagctcctcctgacggagggcaccctcctggtcgaggcaagcccgacggacgtcatatggggcatcggcctggacgagcgggatccccgctgccacgacccgagggagtggcggggcaccaactggctcggccaggtcctgacggacctgcgggagagcctcacggtgctgtcgctgtaaagagaaagggcgccctgaggcgccctttccttttgcccagccgttcggttactggcggcgcttggcaaggccagcggcgatcttctggttgggggtcagctcgccctggcgctgtacgggcttctggttgccggagcccggcggcttgccgccgccgttgggcgcctcgctctcgaaggcccggccgaaggtctggtggcccttcagctccttgaccaggtcctcgaccgtcatgaagccgcccgaggcgttgccgcgcgggtcgcccgagtcgtcgaccacgcggaccacgtagtcctcgccgtccttgacgaccttggtgcgggcggtgatgtgcggcagcagcaggtccggcacgcccttgtgggcggcgatcgcctggaccgcggcggaggtcaccaggtacttctgcagggacttgcccatgccctggatctcggcgtccttcgcctgcagcttggtgttgaagccgctctccagggactgcttcatcttgtcccagttgaccttgccgtccttcgactccgagatcagcttctcgacgcctgcgcgcagggtctcggcgttcatggcgtcgtcgccctcgatgccgagcagctggccgatctgggcgaagcccgagacgtccgggcggttgcgcttggcctcgtcggcgtcgcggcgggccgccttcagggacttgttcaggccgtccaccgcggtggcggtgcccttgaagctgtcctgcaggacgtagccgccctcgccctctccgtagaagccgcggaactgctccgggaccttgtcgatgctgtcgacggtggggttcttcaggaactcgaagtccatcttatctccttctgcgcatcacgcgctggctgttgggcgtcgcgcccggggtgtataggctggcaccttaccgccggcgccgggcccacgcaagccaacgttcaagcagaaagagaaagcccgccattgcggcgggcctcttttacagggagccgggcagctccgcgcccaggtacttccccagggcgtcgtaccagccctcccgggtgatcgggcccccggcgagcgcctcgaggtcggccagctgcacctcgccccggcccgtggacccgtcccgccacctggtcagggtgtagaccctgccgagcagcacctggtagaacagctccggcgccgcgtcggggtcctcgggcacccccggggcgaagtccatcttcccctcccactccgggcccgcctcgaactcgtccgccatgtcaaacctccgtcactgtgatgatgtacttgccgttctgctgcaccacgtcgtccacccggaaccgggtgccgggcatgaacagcacctcgcgctcggtcttgtagtacgagtactgggagacgttcacgccggtcttgccgttgatcctcatgtacacgttgccgctgaacgccgcctgctcgccgtaggacgacgagacgaaggcggagtcctcgaccacggcgcccttgcggtacgtggacagcatggccttcagctgcgagtcgttgaacgtcatgccgcgggagctgacgccctggaacttcggcatcttggacatgccgtgctgggctgcgtccacgtaggcctgcaggtgcgggtccgacgagtacttgcccgcccggagcgcgttgttcagcgcccggtaggtgtttccagtataggcctttaccgctgcgacttcctccgccgttagctcctggagtcccatcgatcgctgcttggcattgaccgccgccaggtcgccggtcggcagcccgttggcgaacttgcgcacgcccgctgcgcgctgggcccccgagtacctcggaggcggcgggaggccgtcgcgcggggtggaggccggccgggaggccgtcatgtccaccgcggtcggggtcacgccctgcttcttggcgacggtcgcctcgttgaaggagacggtggccgtgccctgcttcttgagctcgtactccgcggcctccttcagcttcaccttcatggttgcggagggctcgtagcccgccatcttcttgaccagcttgttggtgttgatcgggcccaggccctgctgctttgccttcttgtacgcctccagggcggccttaccattggcgggcagctgggctgtgaacttctcgatcttgccgttggagacgaagccggtcggcttggtgaaggcggcgttcaggtagggcttgcccgcggccttggccgaggccagctggtactgtgccagctccagtaggtcgtcggcaccgggctgcttgatgaccccgaagaccgacttcatggcctcgtaggcgtcctgcggaccaccgcccgcagccagtacggacttcaccttgtccagggcgagggaggacgtgccgccgagcttctggtccgccagcttgggcttctgcacggggcccgacaccgcctccttgaccgtcgccttctcggagagcgagaccgcgtggttgtaggagttagggctggacttcttccagttggacttccaggtcgcgatgttggtgaccttgacgtccgccgcattggcggggaactgcttcgccagggtctccgccaggtcctggttggacagcatgcccttctgcatcagcttgatggcctcgtccttcagctgcgccgaggtgagggtcagggcagactgggtcgccgccgcctcgggcgccacgacagccgcggcgccggacgagggcacgggcacgacgtccgggatgggcttggccgccacgaccgggccggaggccttgttgggcagcaggccgtccttcttcagctgggacttgtacgaggcgatggacgcctgcttggtctgcgcctccgggaactcggcgaggacggccttcaggacctggtcgtccggcatgccctgctgcagcagcgccttggccagcgacccgaccgaggtgtgcttgcccgcgacctcgtacggcagggcggggccgcccgggagcgggaccttggcgccggccggtggcacggggaacttcttcgccatcgcgtcctttgccgcctggatcgcgggaccgaaggccttgttgaactcgatggcggagaggccctgggacgtcacggcgctcgggctcagggcctggccgtagacctcagccacgagctcgtcggcgctcgtcaggtagtacgagtagagcttccgggcgtccggggacaggcccttcgccgaggccttcagggccgccagaacgtccgggtcgagcagcaggtcgtgctgcttgtggagcaggtggccgagctcgtgggccgcgacctgcttggcctgcgcggcgggcaggacggacagcttcttcccgctcaggaccacgcccttgccggcctggtagtacccgtacgcgccgggcgacccgtccaggtcgtcgacgacggtggaccactggccgccgacggcgtgcttcaggttcggcgggagggaggcgtccaggtcggcgacgacgtcggccaccgccttggcctgcttgagggcgccggcgggcaccttggacgcgggccccaggttcagcgcgccggccttgttcagctcggacttgtaggaggcgatggacgccgccgaggtggacgcgtccgggaactccttcttgatctggtccagcacctcggagggcgacatgccctgctgcagcagcgacttggccttcaggcccacgccgggctggatgacgttcagcttgtcgccctccagctcggccttcagctccgccagggagtagggcttgcccttctcgtcgacgaacttctccagcggcaggccgtcccggaagagctgcgccttgcccttgcccaggacctcgtcctggaactccttggactggcccttcagccacgactggtagttcgtcgaggtgggggtctgcccgatgttctcgtcggcccacttgtcgcggcgggccttgatggcggcgttgcgctcggccgcggacatgcccttccacttgtcgccggcggcctccttggcctccgcccggaagtcgatctcacgctggcggcgggtgcgggtgtcggttaccgtgggccggtcgcccacgatctcctccccgtgcagcacgggggcaacggtcgagcggcagttcgggtgggcgggcgggcgagggcccttgtcgatcgggtagacctcgccgtcccggctctgacagacgggggaggtgcggccgtccagggtggcgacccaccggacgcccttgatgacgtcggcgttggcatcccaggtcgcctggcgcgcggcggtggagacgtggttggtcgccgtgcgggcgatcatctccgcctcccggcgggtggtctccagcacgccgtccttgtagccgccggccttggtgcccctgatgcggcgcaccatctggtcgatggtctcgccctgcaggacgcccagccggatctgctgctcgatgcgggcgacgtcgttggtcgccatcttcccgagccacccctgcagcgggatgccattgatgggagagcccgcgacggccttgacgaccgtggcgggcactgcattgaaggagagggcgatcggcgtcgccccctggagcatggagacctcccactcggcctcggtcttggagaggccctccatgtcctcctcgagctccacctggatgcgctcggcgaccgcggcgcgcatccggcgcacctcggtcaggaggcccctgatgcgggcctccgaggtgtcggtgaggcccgactgtagcagggcgaccagctcggcgtcgctctgggccagcagctcggcggacttctgcgcctccccctgggagaagcgcagcagcctgatctggtggcgtacggtcgcgtcgaggatctcctcgttagcggtcttgggcatcactcgtcatccggggtgggcgggtcgacctgggccgggtcctggttgccgggcggctggttgcccgggggctgctggcccggtaggcccgtgccgttgccgccgccgaacatgtcgcccatcgtgttcttggcctcctcctcgaggaactcggcgtcctgctcctcgtcgaagtcgtccgccaggatgccgcgcttctggagctcgcccaggtaggtcttgcgggagatgtcccgctgcgcgcgggccttgttcagggtgtccagctcggcggcgtccgcctcgccgaggtccacgtcggagtcgacctgcaccgagccgccgtcgtccttgccaagccagttggccgtgtacttcatggccagctcgacgcagtcctggaagtcgtgcacggtggacgccaggtaggacgagctctcggccgagtccagggcgcgcccggtcgccgtctcgtcccccggctgcttgcgcatgtactcggccccgtaggtggccatctggtcctccagggcctccaggtcggtctggcccgccgcgatggccgcccccgtgtgctcgacgtagtaccacttgccctgcacgtcctcggtggtgaggaagttgttggggccgatggtgaccttctgctcggcgggcacgcccgcggccgccaggatggggaagcgcgacacggtgaggacgttgcgctggtcgctcttggattgccagtgctcgacgttcaggtgggccaggtcgatcagcgggggcttggcgtccatcagcccgacgcgcttgcctgcgtagaacgtcacgagggggatgaagtccagggtcgtggtgccctcgctctcgatggcccactcgtccttcttctcgtcgaccagcttccatacctgccagatgccgggctccaggacgcggacccgctcgatctcgacctcctcccagccgacccgctcgacggtggtctccttgatgcggacgtgggtcagcacctccttgccgttgaccatcatggcgtaggcggcgatgaggcactcgggcttgatgtgcacccagtacgggcgcatgccctcggccctgtcatcggccagggtccgggcgaccgccacgccggcagcgtcgaccttctcctcgggggtggggtggtccaccaggacgtgggagaagcccttggcccagccctcgcggaaccaggcccggcagaacgactgcaggttggtgccctgcatgtcgatgtcctcggacagctcctcgaagtcggcgtcgacgtcctcgcccaggacgatctgctcccggaacggcttgccggccagggtgtccagggtctgctccgtcatgttgagcaggacggcccgctcgaggcgggactcgtagttcgcgttggtctcgttgtcgtactggggaaggtactccttcccggcagcgcgcatcgtggtcgtgccgcccaggagggcgtcgatcatcttccacaggggctgcatgcgcaggtaggccccggacggcgtggcgaccgtgggcttcttcttgggtccgtcggccatcgcgggctccttgggctagttgtgagctgatgctcgcgatggtagcccgggaggctgctggttgtgagccagcagcctccgcccgtcacatgtcggccgagctcctgaagcccaggaacacagggaagcgcggcgcgtccttgctgccgcccgggaagaacttgtacttcacgaggcggccgacgagcccgtcgtgccggcggctccacaggtcctggcgctggtcggcggtgaagcccgtgccgatggagaactcaacgcccttgaacggcccattgacggcccgcacgacgagggcgcccatggtgcccatgcccaggaggttctccttgctgtggccgcgctccgtcaggccgagggcactcgtgctggcctcgttggcgttgtgcatcagctcctccatgcggagcagctcggcctcgccgtcctcgaagcgcttcagcttcagcaggtcctgcgccctcagggtgccgcggccgaacttgtagggcgagcaggcgtccctggccatgaggccctcgtacccctcgccaagcacggacgtctcgaccgacaccagctcctccggggtgttgacctcccagtgcggcacgatgacgcacggccggccgagcgccatcacgcgccggccggcctcgtcgtggcgcttgttgaagcccatctcggggtgcgtcacgtcgtcgaagacgtggaagcggaagtcaggctccccggcgatcgacatgaccccgcgggtcgtgttgttgaaggccatcctgtccgccgggtcgccgacgatcagctccccgtccaggccgttgtacatcggctggccgagcacggcctgcacgtggcggttggggatgggcttgaggctgcggctcaccgcgacggagtcccgcacgatgcagcggatgccgtccagcttcggggaggtctgcagcgggaagcgcagcttgaggacgtcgtcgatggacgccgccagcatgggtcggaagctcatcagaagtcccccggcgcgacctggaagcagggcacgccctcggcccgccacatgtccaccaccgacttccggtcgtcgaacacggccacgagcctggcacggtcgtccgggtgcagctgggagagccacaggcgcttgagcttcacgtccggctggtgatcgtgggcgaaccgcatccgcagggccatgcccatgaacgggtcgtgctcccgcagccacggcaggtgcttcagcagccaggcggaggtcttgtccgacacctcgtcggagcggccggaccacacccacacgtcggcgcccgccaggtgcagggcgttggcggtcctgatgaccgcctggcacggggtgtcgcggtcgcaggcggcgtagaactcccgccactgcttggggtcggactcgacgaggtgccggcggtggtcgatggtcgccagtgtgccgtccaggtcgaagatgtagaggggcttactgttcacgggcttgctccagggcttcctcgcccgcttgggtcaggtacattccgacgccgaggcgccggtcgatcacgtcgagggccacgttgacctcggagccgctggcatcgccttcggctaccatgcgggtcagctcggagcgcagctcctccagctcgcggatgccggtctcgtccgccctgcagtacaggcggatgccctcgcggatgccgcggtcgaactcgagcgcgccctcgggctcctcgaaggcggaggcgctccgctcccacagccggtcggccgcctcctcggcgtcctccgccaggtgcagctccgccagcgcgtactcgatgccggcgcggtacatgttgccgggccgccggatcgaccgtgccagccaggcgagcgagatggcgaacagcacgatcgccagggtgagccagaagttgggtggtgagaagtccatcggtgttctccttgggtaatagagaggggaggagcctatcatggcccctccccagtcaaccgcgtaccatcagtccatgcggtccaggacgtacctcgccacgccgccctcggtgcggaccagcacctccagcggggtcttgtcgtccagcctcaggccggaggcgtgctggacgccgcgcggcaggcgctccaggcgtgccgagcgggagtgggcctccagggtggcgcgcacctcgtgcagctccgagcgcaggcactcggggaacagggcgagcgaggcctggcgctggtcggccgcgccctcgatcatgagcaccaccgagttgccgtggtgggcgaacccgccgccccactgggagggctgcttcgtgatcccgaccaccttggcgcggcccgggcggaggccccagttggacgccggcgagccctggtggtagacgtaccaggcgaacgggttgcggcactccacggagtcccactgcaggatcggcggcgcgtcggggtggacggcagtcgtgatcgcgcagaagttgccctggtggggcaccacgacctcgatctccagggcgcgcggcaggacgtccctagcgaacctggcgtaggtcacccgctcggcgcgggtgttgagcagcgcccgctcggtggacagccgctcgtgctgcagcaggtggccgaacaccccgcccgcctggttcttcttgggcggctgcggctgccactcgaacacgacctcgtcggcccgagcggggcgccgctcgagcgaccgggcgagccccatgcgctcaaacaggcgctcggcctgcgccacgttgccggcggtcggcgccgcctgggcgcgctggtaggtcagcgggtccgcgcgcttgttgtggttgcggcggatggactcgacggaggcgccggagcggatgtcgtcgatcagggcgccgagcagcgaggagcgcggggtgcaccaccccttgccggccatggcgacgcggaaccacaggcggcggttgacggcctcgccggagaggtgggccatggccctcttcgcctcgatcaggaactccgccatcttgaccgtcttgtcggcctggttgaggccgcccgtcatcagcatgtcccgggcgcgctccaggtcgcccagggtgaactcccggagggcgaagtgcaggtgcttccggttctcgcgctgctcggccgccacctgggaggcgtccttggagccggaggtgtgggagtgcacgccggggttggtccacaggtgggaccagccgccctgctcgcggactccccagtcggcccggccgccctgctcgcggactccccagtcggcccggccgtcccagaagaactggtccaccacgtggccgcgctcgacggcctcgcgcagggccttgacgaccttgcggtaggggtgacgggagcccagcagggtctcatcccacaggaccgacttggtccggccgtccgaggtcagggtgaccaggctgccgtagcggtgcacgaacgagcggcagcagttgcagtcgtggtactggcggtccagcgggtcgaactgctccaggtagaggtcgaacaggtcgcgcccgacgttcacccggaaggcgttcggcacgacgttcagctgggccttctcgagggccgcgtgcatcgcctgggggcacgtcgtcgaagcgcttggcgaaggtaggtacgcgggcgtggcccatctcgtagggccggtcgcgccgggcctcggacccggtggtctgctgcatgtggttcactggtatctcctgaccgggtgccgccaggcccggatagtaaaagaggggcgacggtcacagtgtaccgccgcccctcctctggagatgccgctgttcctagtttggggcgctggtcagccgaaggcgtcgtcccagctgcccgtcacggcgcccttggagtagtccgtcgccctgttctcgaagaagttggtgtgctccttcccgaagacgatggcgtcgacccagcccagggggttcttgctgacgccgaacagggcgcgctcgccgagctgggcaaggcgctggtccgcggtgtagcggatgtactgcttgacgtcctcggcggagaggccctggttctcgccggactcgtaggccaggtcgatgaaggcgaactccagctccaccatcttctgggcgatctccctgatgcgctcggagtgctctgccgtgcggaggtggggatgctcggccagcagctggtggtacaccttcatcatgaactcgacgtgcagggtctcgtcccggatggaccagctcaccacctggcccatgcccgtcatcttgccgaaccgggtgaagttgagcagcatgatgaagctggagaagagctgcagcccctccccgaaggccgagaagaccgcgatgtccagcgccaggccctccaggccgtcccggcgctggaacaggtactcgtgcttgtccagcatctccttgtagcccatgaaggcggagtactccacctcagggatgcccagctcgtcgatcagggtggagtaggcctggatgtgcacgccctcgcgggcggcgatcgaggccatcgccatgcggatctcggtgggcttgaacgtcggcaggtaccggtcgatgtagccggaggccacgtccacgtccgcctgggtgaagaagcggaagatgtgggtcagcaggtggcgctcccggtcggtcaggtcggcgcgccaggtcttgacgtcctgcgtcatgggcacctcgcgcaccagccagtgcatctgctccgaggccacgaaggcctcgtacgcccaggggtaccagaagggcttgtactccgctctcttcgagaagagggacggactgttgtcgatcatcatgggttgttcctcagccttcacacgcggtgcactcaccgttgaggttgcatgctgcgccgctcacctcgggcaggtcaaccgtctcttcggcctggggcgccggggcgggctcgcgcaggatctccggcatcacgccgaccgaggtggccttgacggagctggagcgcaggtagtagagggacttcaggcccagcttccaggcgcgcatgtggacctggtgcatggtcctcgtgtcgacgtccgccggcaggaagatgttgaggctctgggcctggcagatgaagggctgacgctgcgcggccagctcgaccaggacgcccgggtcgagctccgaggcggtcacgaacagagccttgtccgaggccgacaggaacggcaggtgctgcaccgatccgcgctcgaggaagacgctgcgccagacgtcgtcggtgtcgtggccgagcgcggcgaggcggcgctgcagcgcggggttcttcatgatccccgtgccagccatcgtcttctgggagaaggcgttggcgaccatcggctcggtgctcgggctgacgccgccgcagatgatggagctggtggcgttcggcgcgatcgccaggaggtgggcgttgcgcatccccgtgccgaccaggtcctcgggctccccgcgctcggcggccaggcgcatggaggcggccacggcgtgggccttcagctcggagtacagcacgacgttgaaggtcgcggcctcgtgggagtccagcgcccagccctggtcctggcagtaggtgtggaagccgagggtgccgaggccgatggagcgctcgccgaacacggaggcgaccgcgcgccacatgccgtggggcgcctgctccaggaagacctccagggcattgtccagcatggtgaccaggtcgccgatgaactgctcccgcacgtcccaccactcgtcgcgcttcgccacgttggtcgaggacaggcagcagacggccgtgcggtccggcgtggtcggcagggtgatctcggtgcacaggttcgagtggttgacccggaggcccttggcccgcagggaggggtgcaggtcgcggttggcggcgtcgatgaagaacaggtagggctcgccgaggcgggcgcgctgctggagcatctggatccacaggctgcgggcctggatcgtgtcggtcacccggccggagtgcgggtcgaccagctgccaggggccgttgtcctccaccgcccgcatgaaggcgtcggtgacgttcacgccgtggtggaggttctcgttcttgcggtgcacgtcgccgccggtgggcgatcgcatgttgatgaactcgacgatctcggggtgggagacgtccaggtagaccgcgtgggcacctcgcctggtgcgcccctggtggtaggctatggcctgcgagtcctggacgtgcatgaaggccatcgccccgggggtgtccacgcccttggcggtcacctcgccgatcgagcggacgcggctccagttggtgccgatgccgccgccgttggtcgagagcagggcgttctcgccgaagttggcgaccaggccctcgatggagtcgtcgacgtcgttcaggaagcagctgatgggcaggccgcggttggtgccgccgttggagagcagcggggtggcgaacatgaaccactgcttgctggcgtagtcgtacaggcgctgggccagggcgtcgtcgccgccgctgaaggccttggccgcgcgggcgaaggcctgctggaaggtctcgccggggaggcagtactgcttggacagggtggcggtgccgaactcggtgagcagggcgtcgcgcgcggggtcgaggacaatccccgtcttagggtcgatcatggattcactccggtggttgggccttggcccgggcgtcgggccgagcgcgcatcgtgacgcgcgcacgctcgtagcgcgagccggcgaaaaagaaagccccgacccttgtgggatcggggctctcagcccttccaactcaaccgatggaatcaccatgaccgggctgtccagacccggtaggcgcatgatgccgcgggaggcgtcggccgcgggccgtcgttcagtcccagtgggccgagagcatctcgatctccccgccgcggcgcctgaactcggccacggtctcggcgcgctcctccctgggctgctcgggctgaggggccgcctcgtccgccagcctggagagcctctgccggcgcagctcctggctcttgcgctggaagtagagcctgtcgtactcccgcttggcctcgcggtcccggccgcccaccttcctggacgtgtccacggagccctctatgagcctgtacagcttccggtgcccctggggcctgcaggacgcctcccccgccctgcgcatcttgcccaggacgtccgtgaccgcgtcacggtcgaggcccgcctgcgaggcgatgtgggagatggagtgctcgcccgggttggcctcgagccaggcccggacgcccttgcggacggaggagtaggcggtcacggccgcgtgaacccgggctcgagcatggcgcgcagctgggcgcagctcagcacagagcgatcgatgccgccccggccgtcgggggccatcacgttcaccatcagcggaccccagctcgggctctccgcggtgctgatgtagtggggcacgctgaccaccatgtgggacactcccagcaggtcgaacacggtgcccatgggggtgttggcctcgagccacgcccggtcggcgcgctccctggccaccgcccgcaggaagctctcctgcttctcggccagcatgctcaggccgccgcggctgcgacgtgcctggttgcgctcgtccaccagcttggtggcctcctcctcggagatgggcaggatctggtagggcacgatggcgcccgggtcgaaggtcttcatggtcggactccttggtagggagctcagtttaccgggcccagccatggccgaacgccatcgaactccacaaaaggcgaagcccccgatcggcgggggcttcgagggtgctggcaggggtcggaggcgcttatagcccgccaggctggacgacagtttgctccactcccccatggtggagtggtcccgccgatcctgtcctgccagtctgcaccggggagctccctagggctcctgcaggctctgcgaccgttacccggggagtgggtcgtcgtcggcgggcctgctcaggcgtgcactcctgtgaacatcataagggagctcgccggtacagactgttgggtgggtcctgggcaggttgcgggcctgcttctcctcctggcggcttcaaacctaaccgggaggtgtcctaatccacattagacgacctggaccatggtgtccccgccctcgggtggacctccgggcggggacgtgacgggaggttgatcctgctgcgtggacctttcggatggtcagcccctggaccgctagatcgtgggcgtcgcctcttactcggtgccagcctagcgctgtctcgtcggtcagcgtgtcggaggatggggtaatgatgccgggccgtccgtggcccgcacaccgtcgttcagaagctgccctgccggacggccttccgcttgtgcatgatgcggtagcgggagtcgtcgccggcgtggtcctcgacgtcggtgtcgacgtcgtccgggtccttctcgtcccgcggcatgggcggcacggtgcgcacgaagtcggggcagcgctcgcccaccacgaacacgccgggcgcctcgcgcacggtgggcctgggctcgtccatctcgtccaggttgagggagttcttcagcctcttacggaactgctcccagccctgcttgcgcgcgttgtccgcccgctcccacctgatgcccttggcccgcatgtcgcgctcgatgcagttgccgttctcctcggaccagatggcggggtccgcggggcccggcttgacccggccggcgaggcccatgcccacctccctcaggcggatgccctcggcgatgtccgcggccagcatcttgaggccctcgttctccgtgcccttcttgaggccgtaccactcgccgatgcggaacaggtcgcccctgaccgtgcgcatcctgcgcccgtccgggaacaccaggtccgtgccgtctgactccgcccaccagccgaccgagaagggcttgctgctgccccagtcgaaggacctgtccaccgtccaggtgcgcggtacctggaagggccgcacgacgtgggtctgcgtccgccacaggtcgtcgaacatgccgccggaggtgatgtcccagctgccgtcgagccaggccgcgatctggccggggttcgaggccgccgcccggatgcggttgatgtactcggggtccgcgtccagcaggatgcggttctcgctgatgtggccgtggatggcgatgcggtcgggctcgcccggggtggtgatgatcttgccccgcatgccgggcagcctgaaccgcagcttgacccagttgtgccccttgccgtacgggttggtcgtggcgcgcaccttgcggggcatgcccggcaccgtcgagcggcagcaggagaacatcttgaggtacatctcggaggtggcccagttggtgagctcctcccagccgatccacgggtaggcgtggccgtggtagttgtcgtagtcgtcgaccttcgccatgtggcgcagcaggagctgctcgccgtcggggaaggtccacacgtagtcgctctcgttgaacttggcgcccgggaaccagagcttgaaccaggccttgctcttggcgaccacgtcggagagctgcttgtacgtggcgcggaacaggacgccgcgccaggcggcgccgtagccctggcccacgtgctggcagaagtccgccaggagggcgtcggtcttgcccgggccgcgggtgccctcgaacaggcactcgaagaccgggcaggtcaggaagaggacctggctgccggcctgggggatccaggccttggtccgtgggccctcctgggcggcctgctgcggggtcttcttgcggcgccagtggggtggctggtatgccatcagtcctcctcgtcggccgggaaggccctgtcggggtgcaggaccaggcagtagcaggccgccaggacggtccccagggcccgccaggcgttccgtgcgacccaccaggcgcacttgaggcgcttgcccaggggctccctggcctcggtcctccagaagcgcctggcgcgggtcatcatgtagcccccgcgcaggaggtgggccgcgaagaccggctcggcctcccagttctggtcgcccaggatggacgcgccctgcgaggacatgcccaggagggtgtccgccaggtcgtgggcctggcgcccggtctcggagggggctcgccaggtgcccctgacctgggtcgccaggatctcgccccggtcgtcgagccaggcctccaggtagacgtcggggtcgcgggagtagacgtcccgctccatgcggcgcttggaaatgttggtgacctcggccacggttcacgctcccaggatgcggtctatgacggtgttggcggacatgagctgcttgagccagcgcttgtggtcgtccctcatgcccggggtcatggtcttgtacttggcgaggcggctcagctgggactcggcctcgcggcgccgggcccatgcgacccgcacctcgcgcagctggtccgccaggagggcatcggtctgctccttggtcggggtctcgctcatggcaggtgcccccaggtcgcgacctcgcgggctgccgcttccatctggtcggcctccacgctgaagtcgtggtacgtgtaggccatggactctccctgggcggcgcgctgctggttctcggcctgcatgcccaggaccctggcatgggccgccagtatgttgcccagctgctggacgcatgtggcgttcatcggcgctccatcctggtggcgcactcgatggtcaggccgtagcccagggccagcctgcgcgggtcgacctcgttgccgcacccgcaggcgcagtccccgtcctcccgtggtgcccatcgcttctggcgcgcctgggaggcccgtcgggccgcgtctatggaggcctcgtcgtgcgccagggactcggctgaggcgcggtcgatagggtcggggaagtggtctgcgggctggatgtccatggtggtctctcggggtgtggaaagggcgcccatcagggcgcccggcttgtgctgctctgcgattatcccgcgggcgggggtgcgtcaccgccctcgttgttcccggcgtacttggcctgctgccgctgcacctcctgtgcccaggtgtccttgtcgatggcggccgggatgaccaggacgccgccggccgcgccggtgtgctcgaccttgtggttctcgcggtacttgtcggggcgggcgcccttcagcagggtctgcatcagggcgtcgctgtacttcctgacgaccagctgcttctcctcgccggtgaccttgtcgatgaccgtggtcgtcatgccctggtagatgaccggctcgtcgtacccgtcgaccgcgcggcggaacgcctcggcctcgatgcggtcggccgcctcctcgcgggcgatctcgaacatcgtgttgaaccactcggaggtctccctccagtgctccacggcgccgcgggacacgccggccgcgcggcagccgtccaggacgatgccgcggagcgcgaacgcccgcaggaagaggcggcgccgctcggcggacatgcgctcctgggtgttgaggccctcgagctcccactcgacgagctcgagctccgagaccgggccccgctcgctgaggaagaggcgctcgtcctcggtcatgttcttgacgctcactaggcgctccgtgtgctgtgctggtgcaatggtccgatggtaccgccgcccaggccgggcagtaagccagcggtctcccggggccgacccgccggttcctcgtgcacgaggctccggggaccgcgcctggacgatccggacgcggagcttttgaggggcccgccgtctcggccaccgcccgggctcggccacgaccggaccgatcgcggggaattgccccgcaggtttgccggccgtgttgcccagggcggaccgtgtcggccgtgtccaccaaaaggcctagattagtggatttagcaggaagatctgttttaaaggcttatacaatctaaacctttattaaaaagatctagataagataaaactatgattctgatgcagatttcggcaactgtctgaggttctggaccgtctaggcatctcggtggtggtgccgtcatggtctcggtgtcgtttttcctggtacaacaccgagccaaagcctcgtacggtccgtctgcctcagattccggagctaagtccttgatccgtaagcctcagacggctcgtacggccgtctgagcctggctttccgggggctcagaaggctcgtactcccgccgaccgtggccgagcggggcccccggttcagtcgagggcgtccttgggccaggcgatcttgctgcccagcttggcctccatcatggcgcggcagtcctccaggctggggagcttcgacgcggaggcgcggcccatgcggtccaccttgaccgcgtagtcgtcgtccgccggcttgacctgcgtgttctcgagcctgccgcccaccagcttgttgagccgcatgccgaaggccaccgggtcggcggggcggtacaccctctggtccttggcgaactccgcgtagtccgaccggaggtgctccttgatgatggtgaccgcgccctcgtgccagtcgctgcgggcgttcgggaggatgccgtcgaggagcttgttgtaccaccaccgctcgacgtcgtccatggtcatcaccttctggtccacgagggccgacgtggccggcacgtcgtcccgcggtgcccagccgtcgatgtcccgcatcagcaggtcgtacagcatggcctggatgccgccgtccctgtacatctgcctgttgaggcggctgaagaactccttgtccccgcggcggttgttgctcacctggaagaccgcgaagcggcgctcgccgtcgaggcccgccggcacgacccagtcgccgttggcggccatgaggatgtggatcatgttcttgcccgtcacggcgtcgcggcccttgccctcgtaggcgatggtcggctcggtgaccagctgcttcagcttggcctcgcccgacttgtcgccggcccagaaggcctcgtcggcgaacaggcagatgcagttctgcaggtgcgagttgaaccggcccaccaggtgctcgggcgaggagatctggaggccgtgcgatcccgccaggaacgaggcggcgcggcccagtgtgcccttgccggtgcccttctcgcccttgaagcagagcgccacctcggcggcctgcgacgggtgctggaccatgtaggcgagccagttcatcacgtactcgtaggaggtcctgtcgccgtcgcacagggtctccaggaccagctgctgcagcagggaccagtcccccttcttgggctgcacggcccagccgcgccacaggttcagccagccctcgtgcgtctgctcggggtcgaagatgatgcccttgtactgccggcggtgcggcgacctgatccacagcgaggacttggtcaccagcttgtcgtgcatctccacgagctggttgcagtagaggttctcgaagtcctccttggtggagcgctggaagaacggccgcttgaggacggggtccagctcctccgtgaagatgcggaacttgccgccctccatcacgacgcagtgggtctcgttcatctcctcgagcacgcccgccaggccctcgagcttcggctcggcgcgcagcacctcgtcgtcgacgccctggccgagctcgtcggggtcctcccacgtgtcgaagtcgtcggccgcgtcgacgcgggtcacctcgccgcccacctcctggaccaccttgtggaggaacttgatggtgaccggccggccgccgcggcccgagagggcgtgcagcgagtcccaccggcggccgatgatccaggcgtcgtcctggtactcggggtcctgcgtggaccactcgatgaactcctgccggccctcgccgttggtggcgtggtggcaggccatcatcaggtcgcgccaccggtcgtgctcggagaagtcctccgcgtccagctgctccagggtggaggccagcatctcgggggtgagctcgccgaggcccgcggcctcgccgtgcgccctggtgggccggcggcagaggcgcatcaggttggcgggcatctccggcatctcgtcgagcgacggggccaggtcgtcccactcgtagtgctgcccgcacgggtgcaccgagccggcggccacgacctggcggccgcgggacttgaactccacgccctggtagtcctccagggagtcgagcaggtcgacgtccgccggcttggtgaaccagtagtggtggccaccgctgccggtgatcgtgtggggcgccgtggagaggtccaggtgcgtgtcggcgacgagctcggccagggagtcgcggccctcggggaagttgcgcgggtcgacgtccaggaccatgacggtcgagggcaggcgtacgcccacgttgacgccggtccgctcggcggtctcgatgaccgcgcgggagtcgtactccttggcctgccaggcgccgtcccgcggggtcttgcctcgctggcggcccttggcgtcctgggcgtcgtacctgtgcagcgggatgagctgcaggccgttctctacgtacgcgcgcatgtcccccgtgcgcggtcgctttagtgcgctcactgtgccaccttcctggcggcggcttcctcgatgatcttgcggaccgcgtccgcctcgctcaccttgtccgggtcgggcgcctggcggcgcatctcctccagcttgctcctcaccacctccctgtggtcctccgacacgcggagggacatctgctgattcaaactcattcccctgtactccgtgggtgcatcttggtcgggccggcggcaggccgggatgagcatagtgcgacgacgcagtgcattgcggaaaccgacgaacgcaatgcgtcaggtccgagggcgccgtcgcccgcggacggtggctccgcgcccggacaccggacggtacattgtcactccctaccaaccgctcaacaaggagcacatgcaatggacgtgaacagtttcatggagcagagcctcgccaaccaggcgaagcagaacgccctgctcgagggcatcctcgacgtgctgaaggacatgaatgacaacggggtggtgatcgcgaacgtggaaggcgagcccgtgcaggtcgccatattcggtgcggccatcaacaacaccgcagtgctgaccgacccgggcaccacctcccagccggccgccgagaagcaggccaagcaggagaccaagaaggctgctgaggccccgccggccgagaccaaggctgccgagccggccgccgagcccgaggctgctccgccgaaggacgacaagaagaaggtcaccatcgacgacgcccgcgccgccctgaagaagtacgcggccatcgagggcaacgacgcggccatggacctgctgaccagcctgaacgccaagtccgtcagcgacctggccgagcaggggccggacgccctgcagaagctgatcgacaaggccgacgggaagagcgtctgatgagcgagcagcccaaccagaagctcccgaaggacgccgcgcagctggtcctgtggttcaagggcctgccgcagccgaccgccttcctggtcctccgcgaggaggccgaccgggccgtgcagtccttcaaggacggcgaggacgtgaccttcctctcctaccccgacggccgcggcgtgcgctccgagtcgatcttctcgatcgacgacctgcgcggcgtgaccttcgagtaccccaccatccagctcgcactggtgaactgacatgccaagcgtccacgcggtaagaaacgcgtcgggggcgaagcggtggatgaactgcctgggctccatacgaatggagcacgggcgccccaacaactcctccccggccgcacggctggggaccgccgcgcacgcgctcggcgaggcctgcctgctcgacggcagccaggcctgggagtggctgggtggctacgtccgcctcgacccgaccgagcaagccacggtacaccggcccgccaactccgtactggatgtggcggcgtccgacgtctccgtcccggtgcacgcctcggccgacgggctgccgcccgcgggccacgaggacttcccgatcgacgccgacatggcggacgcggtgcaggtctacctggacaccgtgcgcgacgagatggagcgcatggggccgcacgccgagatggaggtcgagcgccagttcagcctcaactggctgatcggcttcgacttcgacttcgaggcctgggagaaggacccgtcctacgtcagcccgagcggcatccactacgcagccactgacgagttccccctggggcacctgttccacatggacggcagggtgtgctggggcccgatgttcgggaccaacgacgtctcgctgtacctgcccttcgaccacgtctccgtcatcgactacaagcacggccagggcgtcgtcgtcgaggtggaggacaacgaccaggagctgtactacgcgctgggcaaggcgcacgagctccggtgggccttcgagaccctggacctggtcatcgtccagcccagggcgcgccaccaggacggcaaggtccgacgctggtccaccgacaaggccaccctgcgggcgttcgaggccaggctgcgcgaggcggcccgagccaccgaggagcccgacgccccgctcagggcgggcgagtggtgcaccttctgcaaggcggcggccgtgtgcccggcgctgcgcgaggaggccttctcccaggccgccctggagttcggggacggcttcaccgaggacacagtcgtgcaaagcgggcccgaggacagcgacgaggacctgatgctccggatgcgggctatcccgctgctggacatattcatcaagtcggcgaagaccgaggtgctccggcgcctgcgcgagaccccgggcggtcaggcctgcttcggcaagctggtacgcaagaagtcgaaccgcgccttccgccaggacctggtggacgaggtgacgggcgagccggtgtcggccttcgacgtcctggcggccgagggcatcccccgcgagatgatgttcgaggagccgaagcccaagtccccgagcaagatcgaggcggtccgcccgccggagctgatggccaagctgaaggccgacggcgtgcgcgccccggcggcgcacatcaaggcgctcgtcgcgggcgtgtcgttcaagccggagggcggcatcaccgtggccgcgctcgacgatccccgggaggcggtcgacgcgacggccgcggccgagggggacttcgacgcgtacgacggcgaggagagcgcggactaacggctctagttggatcggggtggaagcatgatgtgcttccaccctttctttttaccaggagaacaccatgcacgaacacaagcccatgcaggaactcaccaaggccgacctgagggagatcgagcgctcccgcgagctgatccaggactgcgccgccgacaggggcccgtccctagaggagcgcctggagcgcgcccgcgccggcaaccccaccaaggaggacctgaaggccttccaccgcgaggcgctccacgccgccatgctcgacttcatccaggaggagtccggcatggtcaggggcctcgccgcccagggcaagaaggacctggcccgcgaggtggtccgcctgcgcgccctggtgaagaccatcaagcaggcgacggagaacgtcgacccgtcgcagccgaacttccagcacgccgaggcgttccgtctgatgacctacatccagaccaacgccgagaagccggacgcgcccgaggtgctgaaggtgtggaacagccgcgacggcgtgaccccgttcatcgtccacatcggcggcaagacgttcgagcaccacctgcagggcatgaccggtccgctgtacgacctcccggcgtcggccacgcacaagtgggtgacgcgcaccgaggcggagaccatggctgcctggcggcgcaccctcgaccgcgccgtggcctccgggcggctcgagccggacaaggccgagctgcagcgcgacaacctgtcggcggcgcagtcctggcactacggcatcggcctggtcagcgtcgtgtcggggcgcttcaccgacgaggagctcgaccggccgctcggtggtgtcgacgagacgcagaccccggaataatgagcgcctgccccggtgtcgccgtccaccgcctccctctcgggttgcgtctcggcggcaaacagacccggcaccggggcagactccacctacatcgctaaacagtcaaatcgctactaaggagcgcatcaaatggcagcagccaagcagaacgaccgcaaggtcacctccccgaagttccgtgccagcttcgcctggatcttcaagccgcagcccccgatggagggcagcaccggcgaggccaagtacggcgtcaccatgctgttcgacgcggcggcccgcaagacggcccagttcgaggccatgaagaagctggcctacgccgcggcgaaggagaagttcggcgacaagctcaagccggacggcaacggctggtaccacggcctgcgcaaccccttccgcgacggcgccgagaagtcggagctggagggctacgagggcatggtgttcgtcgccgctaccaccaagatgcagccgggctgcgtcgaccagcagctgaatcgcctcatcaccgacgaggtgtccgaggacggcttctacagcggctgctacgcccgcgccaccctgacggcctacggctacgacaaggccggcaacaagggcgtcgccttcggcctgcagaacgtgcagaagctgggcgacggcgcggcgttcagcggccgcaccgccgccgagaacgacttcgactccgtcgacgacttcgtcggcgagggcgagcagtcctcgggcggcggcagcttcctggactgacgggtccagtctgaccgccccggtcagtaccgccgacgaggcaggtaagccccaggaggggaccttcgggtccccttctttttgcccgtttgatggcgtcccagggcggaaagccccggcatgatagccccacactgtttcggagcacagaccgtgagcaaagactggcaggccgacctggccctggtggaccagcgcaacgaagaccagcgctggcgtgaagaagccgcccgcgtcctggcgcccgtgccaggccagcgcgaggccctggagcgggcccgcgccaggctggcggcagagcgcaagtcgctgctccagcggggcgctgaattgctggggttcaagtgagccccacgaagcgcatgatggacctcattgaggaggctaactaccagttcctcaaggacgaccgcggctgggcgctgtacgacggcgacgaccgctccgaggtcaggggatcgcggtccccgcagctcggcaactcaatctgggcgtcagccaaagagctgggcctcaccaaagaggaggagtgaagatggacgcagaacgtaggaagcggctcaccgagaagctgaagaagtgcatggccctctcgaagagcccggagccgcacgaggcggccgcggcgctccggcaggcgcagaagatcatgtccgagctgggcatcaccgaggacgagctggacggcctggacacggccgacgtggtcgtcaagactcgcgagggctttggcaagtgccgcaccatgagcaacctggccaccatgatggagcgcgccttcggcgtcaaggccgtcttcgagcggaaccccggctccgccgcccgcctgaacgtccgctacatcggccccaagggccgcgtcatgctggccgagtacgcccacaaggtggtgtggcgggcgatgcaggcctcgtgggacgacctgctgacccgccggcccgacatgaagggcgacggcggcaagcgccaggccttccacatcggctggctcaactccgtgtacaagcagatctccgccatcgccccgacggaggccgaggaccgcgccatccagcggcactgcgacaggatctacgagcacggcgtcgtccagcaggacgcgttcaagaagaaggagctcgacggcggggcattccacgcaggcgcccgcgcggccgccgacttcaccctgcaccggccgatggaagagcagcaggccgcactggagcacatcgcatgagctggctgaagaccgtactgtggtacatcctgaccggcggcttcggctcgaagctgctgaccatccccgagagccagcccttccgcgtcgtgaaggccggcggcaggctcctggtcgagcccatccccacccagatggaccccgacgagccggagtacttcggggtcggccagcggatcatcgtggcgccgcacgccggcttccacaagggcgcccgcggggcggtggagttccacgcacccgacggtcgggtgtgggtcaagcgcgacggggcctccagctgcgtcttctactacccgcacgagctcatcaaggaccccgcatacgaggtgcgcccttgaagtgcgacgaccaccagcactccctgccgtgccccctgtgcgcgctcgccgcctggcccctcagggacctggcggccgtggcggacttcgccggcaaggccgtcgacgacacgggcatcgtgccgggggagaggaccgtcaggctgtcccaggtggtccggtcgatcggtcggcggtggaccgagctgtcgcgcgttcagctgacggccctgaagccgctgtacgccaccaagaacgccctggtgcgggaggcccgcataggcgcgatcgacgtcggccggcttgagaaggctgccctggcggtcgccaagggcgccacggccgacccggacccagtggtcgacgcctacgtgcgcgccatcgtgcaggaggaggtggactggtgaagttctcggcataccaccgcaggaagcggttcaagcactggcgcgacccgcccgaggcatgcgacagctgcggcgagcgcctggtcgtcctgacgggcaacgaggtagtctacaagcagcctgtcgggcagtggccctggatctacctgtgtatgtcctgcggggcctactgcggggtgcacccgcactcggtctaccccatcggcaccttggcggacagagagaccagggcgctgaggtccgccctgcacgccatgatagacccgctctggaaggacgggcacatgtcccgcttcaagacctacaagatgctgtccaggatgatgggcatgccggagggtgaggagttccacataggcaacctgaccagggatgagtgcatccgcgccggcgaggtattcaaacactgggagatgatggcggacttcaatgagccgccctgatacagtaagcggctagcccggaggatccatggtaatcgccccgaacaaagagccagcgcaggtctctgacctgccggagcgctcccaggtagccgcggccgtcaagacggccctgttcaagatcgcctccgcctcggtgtacgagacggcgggcatccactacgagacgaacgcccccaaggcgacgatcgactttgaaacccgctccgcctgctccatcaaggactgcggctcctggcggtactccctcgaccccacgacccaggtcatgtgcctggcgtttcgcctgccgcactgggagaagggccgcacggccctgtggcacccggccttcccgcacctgggcgtcgaggaggccgactgccccgagctcgccgagctgttcgagtggatcagggagggccgcctggtggaggcccacaacgcctggttcgagcggggcatctggaccaacgtctgcgtcccgcgcatgggctggcccgcggtcggccacgagcagtggaggtgctcggccgccaaggcggcggcgtactccctgccgcgcaagctggagctgctggcgccagccctggccctgaaggtggagaaggacaccgagggcgccaagatcatgaagaagatggcgaagccgcgcaagccgctcaagcgggacgtggtcgcctggatcgacgacgagggcaccctgccgctgcccgccaagaagtacaagatcgacctgttcgcgaacgacgacgggacctacacggccgtcgcccactccccgatcccggacgtcgaggaggaggtcttccgcctgccactgttctgggtcgagagcgccgagctgctggagcgcctgtgcgcctactgccgcgtggacgtcctcgccgaggaggccgtgtcggaccgcctgcgcgacctgtccccgcgcgagacgcagatgtacctcatggaccaggcgatcaaccagcgcgggttccagctcgaccgggagggcatcgaggcggcgctggagatcgtcgacggcatctacaccgagctgaacgccgagctggtcgagatcaccgacggccgggtccagaaggcgacgcagcgcgcccgcatgatcgagtggttcaacgacaacgggctgccgatcgagaacacccagggcggcacgatcgactcgtggctcaagcgggaggacctggagccgagggtcaggcgcgccctggagctcgtcagggccctcgggcggtcgagcaccgccaagttcattgcggcgcagaactgggccgacccggagacctgga

SEQ ID NO: 49 - protein, 205 aa, unidentified
  REGION 1..205: note = the amino acid sequence of tail tubular protein A of abacteriophage
MAFITKLDIVNACIKTMGETKLNTLEDDHVYKDDAVDLIDRVHRDVSSLALWFNTEWVELKPQATSKYIMVPTDVLKLDCNPSRFGHVVQRGRRLYDRKRNTYEFDHNVHAKLVRLLDFDDLPYEVQMFVRDDSVLRFQSDFDGDNTKYAKIKQQRDDSWINLKAEHIRQIKANPLFARASVDVLRQRFFNYSGHPWHSHYTFPG

SEQ ID NO: 50 - protein, 834 aa, unidentified
  REGION 1..834: note = the amino acid sequence of tail tubular protein B of abacteriophage
MAKAGGTYPDILQGVSQKPAHRRRPGQTHEQINVLSDPVNGLVRRRGTRFAASQAVVTSAELRNMDVFDFMQEGKEYALLYRRDASSSSSATFAFLYNKTDEAFIPLVYENSTWVNTLVSGGASSLAAIGSYVYIAGNTTIPSATSTNVWQEQTNIQRLAAWVRTGKYNTTYTVNLTRTDNTVLTVTFKTVTASYPGTLDTSDIPFYLPGGTEPDPAYQKYVNDRVNEYNSAVNEWIVTSAEQTRPEYIAEKLSDLLVDAGVSSTYIKGGIIIDDDQFKDITVDDEGDGTTFYAAGQEITDATYAVKFHWHGKIIRVRPSGAGADETYYLRAELENGETSGYGSVDWYEAPGVECTIDNLVSQLYIYNGVGYIARNGAGLTSLAPGSGEHPAYGARVAGDGLTSPIPWFIGKPITMLSVFQDRLVVGAQNYVNASRSADYLNFWRGSAVTIEDSDPIEIFAHGSEGDVLRHATLYNGNLVIFGDRQQYGISGDSVFSPKNPLIKAFSANKDSVDAKAQTSGNYIFYAQYGSEGTSLHQMRVGALNGQQTVTDEMSNELDSWLSGTPLQITALTAPNLVMFRTREHPQDFYLYRYEDNKNNGQRIVDSWSKFQYHPALGEIIGVSSYKKNGLVFTARGSLVACDVFDPKGEPDSHACLDSWASFGTPTGVQTASASIAVNKTSPYFLLGCPYAQASDFLNQFDDLDAGALEYGVVSEALVIPTNPFPRDQNGQAVLDGRMSLNKVTVDVEDTAGMLAAVTTRNSNVTTTDFEGRILGDSDNLIARQPVYRGQLNISVGREVRECTYEIRSKDWLPLRVTGLSWTGQTFNNVRRVS

SEQ ID NO: 51 - DNA, 618 bp, unidentified
  misc_feature 1..618: note = the nucleotide sequence encoding amino acid sequence of tailtubular protein A of a bacteriophage
  source 1..618: mol_type = unassigned DNA
atggcattcatcaccaagctcgacatcgtgaacgcctgcatcaagacgatgggcgagacgaagctcaacacgctggaagatgaccacgtatacaaggacgacgcagttgacttgatcgaccgcgtgcaccgcgacgtgtcgtcgctcgcgctgtggttcaacaccgaatgggtggagctgaagccgcaggcaacgagcaagtacatcatggtcccaacggacgtgctgaagctggactgcaacccgagccgattcggccacgtggtgcagcgcggacgccgactgtacgaccgcaagcgcaacacctacgagttcgaccacaacgtgcacgccaagctggtccggctgctggacttcgatgacctcccctacgaggttcagatgttcgtgcgggacgacagcgtgctgcgcttccagtctgacttcgacggcgacaacaccaagtacgccaagatcaagcagcagcgcgacgactcgtggatcaacctgaaggccgagcacatccggcagatcaaggcgaacccgctgttcgctcgcgcatccgtggacgttcttcgtcagcggttcttcaactacagcggacacccgtggcatagccactacactttccccggctaa

SEQ ID NO: 52 - DNA, 2505 bp, unidentified
  misc_feature 1..2505: note = the nucleotide sequence encoding amino acid sequence of tailtubular protein B of a bacteriophage
  source 1..2505: mol_type = unassigned DNA
atggcaaaggcaggcggaacctatcccgacatcctacagggtgtcagtcagaaaccggcgcatcgtcgtcggccgggccagacgcacgagcagatcaacgtgctgtccgatccggtgaacggccttgtgcgccgtcgtggtacgcggttcgctgcttcccaagccgttgtcacctcggccgagctgcgcaacatggacgtgttcgacttcatgcaggagggcaaggagtacgcgctgctgtaccggcgcgacgcctcgtcatccagcagtgcgacgttcgcgttcctctacaacaagacggacgaggcgttcatcccgctggtctacgagaacagcacgtgggtcaacacgctggtcagcggcggtgcatcatcgctcgcggccatcggcagctacgtctacatcgcgggcaacaccacgatcccttcggccaccagcaccaacgtgtggcaggagcagacgaacatccagcgcctcgccgcatgggtgcgcaccggcaagtacaacaccacgtacacggtgaacctgacgcgcacggacaacacggtgctgacggtgacgttcaagacggtgaccgcatcgtaccccggcacgctcgacacgagcgacattccgttctacctgcccggcggaacggagccggacccggcgtatcagaagtacgtcaacgaccgagtgaacgagtacaactccgcagtcaacgagtggatcgtgaccagcgcagagcagacgcgcccggagtacatcgcagagaagctgtcggatttgctggtggacgcgggcgtatcctcgacgtacatcaagggtggcatcatcattgacgacgaccagttcaaggacatcacggtcgatgacgagggcgacggcacgaccttctacgccgcagggcaggagattaccgacgcgacctacgctgtcaagttccactggcacggcaagatcatccgcgtgcgcccgagcggtgcaggtgcggacgagacgtactacctgcgcgccgagttggagaacggcgagacttcgggctacggctcggtggactggtacgaagcgcccggcgtggagtgcaccatcgacaacctcgtgtcgcagctctacatctacaacggcgtgggctacatcgcacgcaacggtgcgggcctcacgtctctggctccgggcagcggcgagcatccggcttacggtgcgcgcgtcgcaggtgacggtctgacctcgccgatcccgtggttcatcggcaagccgatcacgatgctgtccgtcttccaagaccggctggtggtgggcgcgcagaactacgtcaatgcgtcccgctcggcggactacctgaacttctggcgcggctctgccgttaccatcgaagacagcgaccccatcgaaatcttcgcgcacggcagcgagggcgacgtgctccgacacgccacgctctacaacggcaacctcgtgatcttcggtgaccggcagcagtacggcatcagcggtgactcggtgttcagtccgaagaacccgcttatcaaggcgttcagtgcgaacaaggattcggtggacgcgaaggcgcagacctcgggcaactacatcttctacgcacagtacggcagcgaaggtacgagcctgcatcagatgcgcgtcggtgcgctcaacggtcagcagacggtgacggacgaaatgtccaacgagctggactcgtggctgtcgggcacgccgttgcagatcaccgcactcaccgcaccgaacctcgtgatgttccgcacacgcgagcacccgcaggacttctacctgtaccggtacgaggacaataagaacaacgggcagcggatcgtggactcgtggtcgaagttccagtaccacccggcgctcggcgaaatcatcggcgtcagcagctacaagaagaacggcctcgtgttcactgcacgcgggtcgctggtggcgtgcgacgtgttcgacccgaagggcgagccggactcgcatgcgtgcctcgacagctgggcgagttttggtacacctacgggcgtacagaccgcgagcgcaagcatcgccgtcaataagactagcccgtacttcctgctgggttgtccctacgctcaggcgtcggacttccttaaccagttcgatgacctcgacgctggtgcgctggaatacggtgtggtgtctgaggcgctggtgatcccgaccaatccgttccctcgggaccagaacggtcaggccgtgctcgatggtcgcatgtctctgaataaggtaacggtggacgtggaggatacggcaggcatgctcgctgcggtaaccacccgcaacagcaacgtgaccaccacggacttcgagggccgcatcctcggcgactccgacaacctgatcgcgcggcaaccggtgtaccgggggcagctgaacatcagcgtcgggcgcgaagtgcgtgagtgcacctacgagattcgcagcaaggattggctcccgctccgggtgaccggcctgagctggacgggtcagactttcaacaatgtacggagggttagctaa

SEQ ID NO: 53 - DNA, 44585 bp, unidentified
  misc_feature 1..44585: note = the genomic sequence of a bacteriophage
  source 1..44585: mol_type = unassigned DNA
ctgctatgctttgccattgtcacaccgtggtactccaagaaccgtactacgttcgttgagaacatggtgctgcgaattgggccgggcagttccttcgaccggtacatagccgtgatggaacatctggctgacatcaaccactgcgactcgctgagcgcaggcggtgcactagctcggaactcccgagcactcacacggatgtatgcacgctacggctacctgctggaacggcatgctccccaattcaccaagcgaaggagttaacctatgggtagcatcgttggtggtgggtctgcgaagaaggctgcgctgaagcaagcggcggctatcgacaagcagaccaacctccaaactcaatccacgaactaccagattcaggcgatggccgatcagatggcacaggcagctgcacagcaggccgcatccgagtacgccgagaagttgctgagtgcccctgtcgataccgtcgatgtgcggctgggtacttccgacctcgacttgcagaccgccgacttgatcggccgacgcaagaccgcccgctccgcctacacccgacccgtgaccacgaccgcagcttcccggctgacgaccgtggccgggtcagacctgttgtgaggtgagcatggaccattcgatccaaaccgctcaccgccagttcgaggcttacgacaacaagcggcagggcatcatgtaccggctcgaacgatattcgagttggaccgtgcccaagctgttccctcgtaagaaccgcgatcaggacaccgagccgctgacccacgggttccagtctctcggcgcgcaggcagtgaaccatctggcgaacaagctgatgatgtcgctgttcgcaccgtcccgcccgttcttccggttggagctgaagcgcaaggcgaagcaggccgcgcaggaacaaggcgctgacttgcaggccatgcaggcgatgcttgcgaaggccgagcaggacgcgagtctcgaactcgacaagcgctcgatccgatcccgactgtacgacctgctgaaaatgctgatcgtgctgggcaacgccctcatggtgttggagaaggatacgatccgcgtgctcaacatgcggcactacgtggtcaagcgcactcgcaccggcgaggtctacgaactgatccttcgggagaaggtgcacaagacccagctggaacccgcagcgctcgctgccattgtcgcgcacccggacttcaagcccgatgacgacggtatggtgtgggagtacaagtgggtaaagctggaccacaagaccggcaagtacaacgaagacgtgtggatttgcaactgcaagctgcccgccaacttctcctcgacctacaccgcagacaagctgccctaccgggcggtgagctgggacttggccgcaggcgacgactacggctcaggcttggtcgaggactacgaggcagacttccagtcgctctcgatgctgtccgaggccgcagtgcagggcgcgatccttgcatccgagtttcgttggctggtgaaccccgcaggtcagacctccgtcgaggacttcatggcatcgcccaacggcgcggccatccccggcatgaagggtgacatcgagctgattaacgcaggcgtcgatggcgtgctgcaaaccaaccaagcaatccagtccacctacatcaaccgcatcggcgcaggcttcctgttgcagacggcggtgactcgtcaggcggaacgtgtgaccgcgcaggaaatccgcatggtcgccgaagaactggaaggcgggctgggtggtggctactcccgcatcgctgcggacgtgcaggtgcccgtcgccttttgggtgatgaacctcacgggccgcgacatccggggcaaggacttggagcctgtcatcatcaccggcttggccgcgctctcccgaacgggtgaccgtgaccggctgttggagttcggcagcaacctcgccaacgtcctcgcactgccgccgcagattctcgaacgactgaagctgtccgcgtggatcgccgacctcgccgccgctggtggcttggacccgaacatctacgtgctgactgaggccgagtacggccagatgatgcagcagcgtgcacagcagcagctggtcatgcagaacgcatcgcagcagatcgacaacgccaacaacatggagacacagacacaatgagttccaacgcacctccgggcggtggtcccggcgcaaccgtgatcgcaacctcgcaaggcaaccagcccgcaccggcagctccggctcccgccgacgacaagctgctgcccaacggccaacccgccgcaccggcacagcccgcagctcccgctgcacctccggctgctgacgcgctgagtctcgaacccgctgctcccgcacagcccgccgccccggcgaacgctgcgccgaccgctgtgtcgattccggactacggcgacaacggcctgaacatcgcggccgaatacttcgtcaacaccgttggcctcgacatcgacagccgcgaactgaccgaagcagcgaagggcaacttcgccctgctggaagccaagctggaagtcctcggcgacaaggccaagggttccgcaccgatcctcgctctggcgaaggaaagcatcgctcgtgtcaccgctgctgcaaccgcagctcacgccgcgaacgttgctgctgtccacgaagccgtgggtggcgcagagaactgggctgcgatccagcagttcgcacgggccaacctgcccgccgaccaactgaagcaggcaggcgaatcgctgtcggctggtggcttcggcgcacaggcgaccgcgcgttacctgatggctctggcacaggccaatcccgcgacgaccgtcaagggcgcaccggctaccaatgccgccgctccggccgcgtcgatcaacggcgtcgctcctctcacgaaggagcagtaccgcgctgagtaccgcaagctggttgccgagaagggcatccgtggtgcggcccactccgaagaactgcgtgcactcaacgcgcgcgtcatccactaagaaccaaggagcaacataaagcatgagcaccatcttcccgactgtcccggttctgccgaatcaggtcaaccagtccggcaacgaaaacgccctgatcctcgaacagttcaccggcgatgtcgagcacacctatgtgtccagctcggtgctggaaaagttcttcccgcgcaagcaggtcaagggcaccaacaccctgaccaagaaggccatcggccgaaccaagctccagaagctgaagcgcggtgatgcgccggacggcaccccggtggacttcagcaaggcgtcggtgaccgtcgataccatgcttctgtcgcgtcacagcatctggcagctggacgaaatcttcaccgacatcgacacccgcaaggaaatcgccatcgagcagggtcaggaaatcgccgagttcgtggacctgaccatcagcatcgccgccgcgaaggccgcgtccgccacccagtcgatcttcacccgcaacggccgcgcgccggaaggccacttcggtgccacgcaggtggttctggctgctgccggtgacgagaacgatccggccaaggtgtacgccgccatcggcaagctgttctcccgcatggaggaggagaagaaggtcaagccgcagcgtgatggcgtggtcctgatcgtacgtccggcgatcttctacctgttgcagcaggccgagcagatcagcaacggcgagtacctgacctcggacggcaacaagctgaccggcatcccgaccttccacggctggggcgtcccggtgctgtcgagcgagaacctgccgaacaccgtgatcgaaggtcacctgctgtcgaacgacgacaacgacgacttctacgacggtgacttcagcacgctggtcgccgtggccgtgtcgccgaaggccctgatgatcgccgaagcgctgccgttgcagtcctcggtgtggtggagcgacgcctcgaagtgctacttcgtggactcgtggatgtccttcgccgttggtctggatcgcgtcgagaacgcgggccgcatcgacaaggttgcctaatccgctgggcgcggtccctgaatccttcgggtaactcaaaccgcgcctcgccttccaccaacacaggagcaccatcatggtctttgaccgaccgttcgagatttccaaccgtgtcgtcgccgcaactggcgtggccggtctgcccgccaactccgtgggcaccgtcgtcggcgtccactacgacgccatcggctcgggctgggtcgtgcgtgtccgtttcgtcgatgacgaaatcggctcgcaggacgtggagtacgcaccggcctcgctggctctggctgcggactaagcaacatcccggcaggggcgctccggcgtctctgccttgttcctctcaggagacaccatggcattcatcaccaagctcgacatcgtgaacgcctgcatcaagacgatgggcgagacgaagctcaacacgctggaagatgaccacgtatacaaggacgacgcagttgacttgatcgaccgcgtgcaccgcgacgtgtcgtcgctcgcgctgtggttcaacaccgaatgggtggagctgaagccgcaggcaacgagcaagtacatcatggtcccaacggacgtgctgaagctggactgcaacccgagccgattcggccacgtggtgcagcgcggacgccgactgtacgaccgcaagcgcaacacctacgagttcgaccacaacgtgcacgccaagctggtccggctgctggacttcgatgacctcccctacgaggttcagatgttcgtgcgggacgacagcgtgctgcgcttccagtctgacttcgacggcgacaacaccaagtacgccaagatcaagcagcagcgcgacgactcgtggatcaacctgaaggccgagcacatccggcagatcaaggcgaacccgctgttcgctcgcgcatccgtggacgttcttcgtcagcggttcttcaactacagcggacacccgtggcatagccactacactttccccggctaaggagacatcatggcaaaggcaggcggaacctatcccgacatcctacagggtgtcagtcagaaaccggcgcatcgtcgtcggccgggccagacgcacgagcagatcaacgtgctgtccgatccggtgaacggccttgtgcgccgtcgtggtacgcggttcgctgcttcccaagccgttgtcacctcggccgagctgcgcaacatggacgtgttcgacttcatgcaggagggcaaggagtacgcgctgctgtaccggcgcgacgcctcgtcatccagcagtgcgacgttcgcgttcctctacaacaagacggacgaggcgttcatcccgctggtctacgagaacagcacgtgggtcaacacgctggtcagcggcggtgcatcatcgctcgcggccatcggcagctacgtctacatcgcgggcaacaccacgatcccttcggccaccagcaccaacgtgtggcaggagcagacgaacatccagcgcctcgccgcatgggtgcgcaccggcaagtacaacaccacgtacacggtgaacctgacgcgcacggacaacacggtgctgacggtgacgttcaagacggtgaccgcatcgtaccccggcacgctcgacacgagcgacattccgttctacctgcccggcggaacggagccggacccggcgtatcagaagtacgtcaacgaccgagtgaacgagtacaactccgcagtcaacgagtggatcgtgaccagcgcagagcagacgcgcccggagtacatcgcagagaagctgtcggatttgctggtggacgcgggcgtatcctcgacgtacatcaagggtggcatcatcattgacgacgaccagttcaaggacatcacggtcgatgacgagggcgacggcacgaccttctacgccgcagggcaggagattaccgacgcgacctacgctgtcaagttccactggcacggcaagatcatccgcgtgcgcccgagcggtgcaggtgcggacgagacgtactacctgcgcgccgagttggagaacggcgagacttcgggctacggctcggtggactggtacgaagcgcccggcgtggagtgcaccatcgacaacctcgtgtcgcagctctacatctacaacggcgtgggctacatcgcacgcaacggtgcgggcctcacgtctctggctccgggcagcggcgagcatccggcttacggtgcgcgcgtcgcaggtgacggtctgacctcgccgatcccgtggttcatcggcaagccgatcacgatgctgtccgtcttccaagaccggctggtggtgggcgcgcagaactacgtcaatgcgtcccgctcggcggactacctgaacttctggcgcggctctgccgttaccatcgaagacagcgaccccatcgaaatcttcgcgcacggcagcgagggcgacgtgctccgacacgccacgctctacaacggcaacctcgtgatcttcggtgaccggcagcagtacggcatcagcggtgactcggtgttcagtccgaagaacccgcttatcaaggcgttcagtgcgaacaaggattcggtggacgcgaaggcgcagacctcgggcaactacatcttctacgcacagtacggcagcgaaggtacgagcctgcatcagatgcgcgtcggtgcgctcaacggtcagcagacggtgacggacgaaatgtccaacgagctggactcgtggctgtcgggcacgccgttgcagatcaccgcactcaccgcaccgaacctcgtgatgttccgcacacgcgagcacccgcaggacttctacctgtaccggtacgaggacaataagaacaacgggcagcggatcgtggactcgtggtcgaagttccagtaccacccggcgctcggcgaaatcatcggcgtcagcagctacaagaagaacggcctcgtgttcactgcacgcgggtcgctggtggcgtgcgacgtgttcgacccgaagggcgagccggactcgcatgcgtgcctcgacagctgggcgagttttggtacacctacgggcgtacagaccgcgagcgcaagcatcgccgtcaataagactagcccgtacttcctgctgggttgtccctacgctcaggcgtcggacttccttaaccagttcgatgacctcgacgctggtgcgctggaatacggtgtggtgtctgaggcgctggtgatcccgaccaatccgttccctcgggaccagaacggtcaggccgtgctcgatggtcgcatgtctctgaataaggtaacggtggacgtggaggatacggcaggcatgctcgctgcggtaaccacccgcaacagcaacgtgaccaccacggacttcgagggccgcatcctcggcgactccgacaacctgatcgcgcggcaaccggtgtaccgggggcagctgaacatcagcgtcgggcgcgaagtgcgtgagtgcacctacgagattcgcagcaaggattggctcccgctccgggtgaccggcctgagctggacgggtcagactttcaacaatgtacggagggttagctaatgggttcggttaatacgatcctgcaagcgaacaacaccacccgcgttgcccgtgcgaactaccgtgcagccgttgcgcagaccgacaacacgaaccgcagcgaggtcgccaagaccggcttcgctgatttcatgcggtccctgaagaacaacgcccagctggacgccgccgcgaaggagtacaactccaacatggaggcgctgtccgaggagctgcgtgcacgccaaggggctgggcttaactcccagctccaactggcgaacgctcgcggtgcccttcgggcgcaggccggtgctgtcggtgtaggcggttcgtccgcagacctgatggacacgatggtgcgcttgcaggcggaaatggacaaggagacgcaggacaacgcggtgtcgttgctcgcctctcgcggtgcgtcgcagacggcgcaggtgatgtcgcgtgcatggaacgggatggacatgagccgcacgttcggccagttcgactactcgcagcacatcgagccgaaggcgatgaagcgtcgcttgggcaagctgatcggcgtggccgtggctacctacttcggcgggccgatggcaggcgaggccgtggcggacttcgcagtcggtacgtggcaggcggacaacggcaacttccaaggcatgtcgcagtccttcaacaacgcagcacagaacgggatgcaggcgtggcagcagtccaatgatcgcggcggcaagtcgtgggcgtccactaccttcgggtacaacgacggcaccggcaagcagtccgtgaccggggcgaaggtcaccggcaacttcggcaacaactacgacaacttctccaccactacgtccggcctcggctggttcgatagcggcagcggaggcaactcaggaggcgcatggtaatggctgacatcggcacggttaccttcaacacgcagtccgcattgcagggtggcatcaacgccacccccgcactgtcgggcaacaccagcattcaaggcgctggtgtgaatcaggtcggccccgttcgctcggggtcggattggttcgagagcactggtggtatgacgatgccggacagcaacctgcctgagttcttgcaggaactggcagcgccgaacaccgccaagctgaagcagcagcagatgtgggacggcttcgtcgccgcccgcgctggtaagaccatggacgagattgctgcgaccgagccgtggtacaagaaaatcttcggcgacaccaactacgagattggcgcgagcatgtacaacacgctctcgcaggtcaacgaaatggagagcgacctgctgcggcgcatgccggagttgcgtcagcttccacccgaggcgatggcgaaggagttcaacgacctcgccactgcccggatgaccggcaacggtttcgcggatacggtgttgcagaagaccttcatggatcgcgcgggttcgcttatggacctgcacacgaaggagcgcacggcgtggcagcagcaggagctggtgaaggcgcagtacgctgcgaactcgtcggcgtccaccggcttcaacgaactggcgaagcgcacggcgatgctcggcaccaaccgtcccatggacgagaaggctaccgaggcactgacgcaggcgcagctgtcgttgctcgatggcttgtcgccctcgcgctaccagacggacgagtcgtacaagtcggcgatcaccgcgttctaccgtggcgctgcggatcgcggcgagttccacacgctgaagttcctcaacagcaagggcgtgctgaacgccatcgacccggatgggcagctgggaatccagcagtacgtgaagcaggcgcaggatcgttaccgctcggactggctcgacgccaacccggagcaggccgagaagatggcgctcgtctccatgtacgcatccgagggcatcggtgccaagccgtcgcaggcgatgatcgaggaaatgaactcgacctacgccgccgagactggcagcgacgcgccgctctactcgggcacgcagctcgcttcgatcatggcgcagtccgcaggcgcgcacatccgcgcacaggaagccgtcatcaaccagcgcaacgctgcggccaaggctgcactgactgaccagcagaagctggctgctcaggaggaggacatccgtggtggcatcgaagcgttcaagcgcggcacctacgcgcagacgatcaacattcccggcttggacaaggagctgatcgaggccaacacggtgcaggcatggaacgacacgatggcgaagaacccgaaggtcgccatgtcgcagctggtgtggaatgccaacaccggacgcggcgctgtgctgaagggggtggccgaccagttccagaccacggcacgtgcggtactgcgcgaccagccgaacacggcagcggctgcgctgtaccagcagtggaaggaactgaagcagaccaccgccgcacgcatcgacacgaacggtcagcccgtgcagggccgactgaccggcgcgactaccgctgcgctgtacttcggagatagcgtcaacacgttcttcaacaagctgcaagcgttggagaatggcggcgtgaacttcgagcttgcctacgaggtggcccgtggcgaaatcaccaccgacgatcccacgcagttcgacgcgaacagccgtaaggaatccgaggctactcaggctcgtgttactgacgctatcgcaaagctcaaccccaagtacctcggaatgttcggcaacaagctgggcgactctggccgcgatgcgtatgctcgcgccatcgtccggtcggtcaccgacaccggcggtctgctggacacttctgcggaaggcttgcaggctgcggctacccatgccaagctggcctatggtctggaagacgcaggcaagtacgcatgggagaacgggcgcgacgacgagggccgagtgatcggcggcgtgggtgcatggctgggcttcatggacacgaaggaaacgggaccggctatcgagaaggctatcgacgcagcactgcggcgggtcaacatcgagccgagcaccggactgaaggccgacgtgttccgcatgaaggacagcgagaacggcgagccggtgctgtacgtcaacgctgttggcgagaagggatggaaggttgtgccggtgtacgggcgcgacatcaaggccgagtacgagaagcacacgaagcagcagcgtcagttgcaggccccggtaccgcagggctacgttcgcatgaacgacggtacgattcagcagagcatttccatccaacccaaactgtaaggagatagacaatggcactcgatctttcggggctgacccaagaccagcagattgccaaggctgccgcttatgcgggagtgccggagtccatcgtgcgcggtcagtggcgagtagagtccggcaacggtcgcgccgccaaggacgctgacggtgtgatccgcagcaaggcaggtgcacagggcgacttccaagtcatgcccaccacgcaggcaacgtgggaagcgcgcaacggtcgcaagtacgacatgcgcaacttccaagacagcatcgagctgtacgccgacatcatgcgcgagaacatgcagcttgccaagggcgacgttacaaaggcgctgcgcatttaccaaggcggcaccaaccagaagaactggggacaggagaacgcggcctatgcacccagcgtgctgggcggcgcttcggctcccgctgtgtcggcacagccgcgcagcctgagcaccacgcaggcagacctcaacgctgcatggcagggtaacccgaacatgcgcgaccgcacgtggtccggtgcgtccatcccggatgcgtggactggcgctcccatcgaaggccgcaacgctctggcgtcggctgcgaaggaacacatcggcaagattcgtgcgggtatcgccgagctgtcgatggggcaggtcgcgcaggaaggtggcactgccgcgcaggccgtgggccgggcgcaggccgtccgtgcatcggatcaggttgtgccgtggtgggttcgtcaggaagtggacgtgctgaacaccggtgctcgcaaggcgctgctggatcagaccgagcaggcactcgcacaggatcgctcggacgaggagctgcgcaattcgctgaccttcctcgacaagtggggcgcggcgttcgacagcggcatcggtgctgcgatcagcaaccagctcgcacgcgaagacgagaacatcccggagggctggaagtacgacccaaaggaatgggagaagccgtggatgaccgccgacgaactggaagacatccgcgatgcagcgtactcgccgaacgagttgaagtacgtgagcgaccggcagttcatgcgtcgcagctccatgcgcatcaaggaccagcagaccggttggtcgagcttcggttacgacctcgtggcaggcttcaccgatccgggcaactgggctatcggcggcgtcaccgctgctggtgctaaggtgctgggcgtgggttctgctgcgctggtggccgagggccgggtgggtgcatcgcttgcatctgccgctgcggagaacgcagtcggctccgtcatcacggatgccgcactggtcggtatgggtgagcgccgcaacttcgcggacttcatgaccgacgccgcgttcgccaccaccatcggtacctcgatgcacattccgggcgtgcgctcggctgcgcagattcgggacaaggccaccatcgacctgtccgcaggcaacgctgccgcttacggcgaagcgtggtcggctgacctgaaggcgcgcgctgtggccgagctgggcgacaacgccaatccggtgctggtcaacaaccgcatccaccagcttgccaagcaggaggcagtcgattggctgcgggctggtatggctgatgttccggacgacttccgcatcttcgcgcgtcccgacgtgcaggagacgaccaccaccgcaggcaccactggcgcactcgcgcgagacgtggacaacgtggacgcctcgaccggtcggtacaacgacaccgtgggcggcgtgctggatcagcatgacccgctgctggaacgtgcgtggaagactgcgggcatcaagggcggcaacgtcgagggtgtgctgaagtatctggaatccaacgcctcgatccccgaggacgtgcgcgccatcgccaatgcgctgaagcgcggcgggcgactggacacggtgaagatcgtgccggagtccgaactcgacaagtggttcggtggttccagcatgggcggcggcttccgtgtggcaggcggttacaaccccggcctcgacgcgatggcaatgcgcaactacacgcccgaggtggtggtgcacgaaatgctgcacgctgctaccctgcgtgagcttcgcagcaacaccgtgttcggtcaggaaatggaagacctcctgacgcacatcaataacagcatcggcagtgtggactccacgctgaccactgctgccatggaaagccgcatcaaccagccgcaggcagggttcctcgctaacaccgacgagctgatttcctacggcctgaccaaccgcgctgtgcaggcggtgctgcgtcagatgcctgcgccgggcaacacccgcccgaatgcgtgggaatggttgaaggacaagatcgcacgagtgatgggactgaagaatcaggagtccgcgctcgaacgtctgatgtccgtggtcggtgacaacctcggtgccgaagtgcgtgacactcaggcgtcgtcccgtcagactcgcggcatgctcgccaactcgatcttcaagtcgaaccgcgagcgcaaggcgttctaccagcgcacgggtctggacaagtccgttagcgacgacgcgatgcgcgtgcaggttgctgaggtgatggcccgctccgagcgcttcagtgcgaagtacggtatcgacgcggccaagctgtccaccatcatgcagcgcttcgggctggaagctacgagcacgaccctgatgtcgtccaagtctccggtcgcgcgcatgcttgcggtcaccctgttggagaaccccgagggtgcagcaggccgacacagcactgcggcgatggatcggcacggccggttcgagtcgttcatgggtacgcgcccgcgtcagtgggaagcggcctaccggctgtggcgtgctgacgtgcgcggtatcggcgcgatcaaggacttcgccacgggctggaaggcacgtgcggacttcgagtacgcagtgaagctgtaccgcgagacgcgcttcaacggcggtgacatcccggacgcacacgaggcagtgaaggcaatggcccgtgagctggaccgtggctacaaccgcatggcagcagagcagcgcgcggcgggtacggtgggcgcacagcgtctgccggaagaagacgtggagggctacgagtcccgcacgtggctgggtggcagcatcgctgctgctggtccggttcgccgtgagggtatccgtcaggcgatgcgcgatcagttcgaggtgatgggcgagctgtacggggacgacttcctcgacaagttcgctaccaagtatctggaacgcatcgagcgcaaggctgcgggtatcatcgaagcgccgggtcaggtcttctcggagtcgcaggcggacacgctgcgcgacactctgcgggcgatgtcgctcaacgaggaggagattcagaaggtgatgggcaagtacagccgtggcggtgcgaagcacaccaaggcgcgtatcgacctcgacgtgaccaagcagtacgaagatgccgagggcaagttccgtctgatggactacctcgacaaccgcgtgatggacaactaccgcaagtacgcgggccgtgttgctggtgacatcgctctggcgaagcacggcatcctcggtgacgcgggcatcaacgtggcgcgcgaggcaatgcgcctgaccggtgccaacgacgtggagctgaaggcgttcgagcaggtgatgtcggagttcctcggtcgccctgttggtaccggcgatccgactgttctggcgaatgcgcgcctgctgacctcggctatccagctgggtggtgcaggcatcaatcaggcagcggagtacagcaatggccttgccgctgttggtgctgctggtgtggctgacgcaatccgtatcgctccccgcatgcgtggcgaaatcatgcgcatcctgaagggcgaggagagcggcaaccaaatcctcgacggcttcgagttcatcagcggtcgcggcttcggcctcgccggttacgacctgcacatgttcaactcgttggacacgcaggcgtcgatgtacggcagcgagcgcgcaggcttcctgacctcgctggtgcagaaggccgcgcacacgaaccgcatcctctcggggcaacgggccgtgctcgccgtgcagcagcgaggcttcgcggaagtgctgatcgccaagggcgtgaagttcctgcgcgacggtgccgaggctgacaccgccctgaaggacatgggcatcgacgacaacctgctgaaccgcctgcgggcgacgcaggataaggtcgtgcgctggggcgctgacggtaagctggaagcagtggacccgcgcaacgtcgatggactggcggatcggcaggcatggttggcgttctacaacgcgatcaaccgtggcacctcgcagattcttcaggacaccttcatcggcgagacgggcaagtgggcgcacaacggttggctgaagctgctgttccagcaccgcacgttctcgctagtcgcacagcagaagcagctgggccgctacgtgggtaactacggtgcgtggcagactgcgggcctgatcgctgcggcgatggccgtggctgcgccgctgcaagccctgcgcgtgctgtcccgcgtggccctgatgaacgatcaggagcgcgaggaggccatcgaccagaacatcctgtcgcctctggcgctgggcaaggccacgctgaactacgtgtcggcgacgggcatgctcaacgacgtgctggacgtgggcaccggtgtggctggtgggtggtacgagtacgccaccgacacgcagggtccgacgtggctgaagcagctggccggtgggcagttcggcaaccgcaaggaagtgatcggcgggcagttcgcgccgtcgctgggcgtcgtcaacgacttcgctcagggcatcgctggcaagccggagaatctggccgacgtgattccgggcgggcgactgcccatggtgatcccgctgctgaagggcgcggccagccagtggaaggaggagtgagaatcagggccaaggatggcccacccttttggtacacctatagcaaacaggaggcagcatggcagttccagacccgcagctgcgctacgcgacagacgtgttcgacgccgatggcgtgaccactgactggcagatcagctttaccggtggctacatcaatccgtcccacgtgtacgctatgagcggactgctggacgaggagactcagctgctgaccgaccggactccccacaccgtggaagtcctgagcgaagacgatgacgctagtaccgtccgtgtctcgcccgccgtcgccgctgggcgcaagctctacatctaccgcagcactccggtgcagcagatgctcgttgactacgttaacggtagcatcatcagcaagaccaaccttaacctcagcaacgaccagctcctgaagatcattcaggaaatgttcgactcgctcaacatcgccacccttagcatcgaccagcaggtcggcgtgatcgtggacctgaacgagattatccagaacatctacaagcaggtcaccgagttgttagccgctggtggtatcgtgtccgtcgccccgcgcgtctggtccggtgcatggaccggcgatcaggtggacgacaccgacttcgacatggtgggcgcggacgtgtccggcgctggtttctacgacgtgtacgtcaacggcatcggcatgcagccggacgtggactatcaggtcacgctggccgacggcaccgatcccagcttcatccgcttcgccacggttcctgccgagggcagcatctggttcgccgtgctgcgtggttacgccaagccctacaccgggcctgcgccgatcactgctgcgagcctgcgcgtgccgatcatcccggcagaaggcccgacctactacgccgcgaaggctaccgagtacggcctcgtgcgctgcacgtatgccggaggctgcgccgtcaacatcaacctgatccccgaagtgggtgacggtgagacgaagctcgcctcgggcagctacttcagcgtgcagcagaaggcaggcccggtggtcatcactggcgacgtgggcgtgaccctcgaagtcccggtcggctgcaccgccgcaactcgcggcaccaactccgtcgtcactgcaacgtgcatcgacggcgacaccaacacgtggttgctctcgggcgacttggctaaggagtaagcatggctaatcacttcaggctgtacggccgaccgctgatggcggacgaggttgcagatggcctgtcggtgacgggcgtgctggaagggtacacggcgggcgaggcttacgagtctcgcctgtccatcaacaacccagtcggccgctgcaccgtggaggtcatcgaatcgacgctcccttcgggcgctgcggtacgggtggacaacatcaccaaggaagtcgtcgtcaagtgggcggctttcactgaagtcgtggacgaggaaaccctcgtgcctaatggcgacttcgaggcaggcgacgacggcacgtggttgccgggcggtggatcgaacggcgaaggctggtcgattggcaccggctcggactacgacaccgacagcggcgtatacagcgctcgcttcgccaacatcaagacgggcggtagcgatctactcaacccgctgattcccgccaaggtcaacgattacatccggtgcaccgccgaagtccagcagggcgcaagctccaagggcaaggccggtgcgcgcgtgtccatcatctaccgcaaggaggatgggaccgagctgcaacgcaactggggcaacatggtttcctcgggcagcaacggcgcgtggcaccagtcagtcgccgagggcgcagcacccaaggacacgaagtacgtgcaggtggtactgtccgcattccgcagcaagcagaacaagccgctgtgggtggacaccgttaagtggaaccacaagtacgtgctgggtcagaacgacgacagctcctacttcctgagcatcaaggtcacggacgggttgaaccgtgtggcctactggtcaggacgtatcgaggagcagggcatctacgtcacgtcgaagctctacagcttctaccagttcgatgctgcggtgcttaccagcagcttcgctgggtacagcaacatcgacatgctcccgcccatggactccgccagtgttggttcctcgttcgtgggctgggaactccgaagctctcggcaagactactcggctgctcccgagtccatgatgtacggaagctctttcgtttcgttcgacatccgctctatacgaaaggactacacaccggacccggagacggctcgtatttctggctccttccattccttcaccctgaagcagcacccagtagtcaaccagccgcttgacgcgactgtgcgggctaagagcggcttcgtctcatggagtttcgcatgatccacaacaaagttggagtagctggtgtgttcaccatcagcaagggcaagtccttggactcgctcgaagtagttgcagactggcagaacaacctgattaccaacggcggcatggacgcactaggcgatcagggtagcggttacgctcagagcctctacaacatcatcgggtacctcgcagtgggtagcggtagcgccgagcctgcgtttaccgacaccgcgcttggcgctcaggttgcgcgagtcggccggacaagtacggacaacggaggcactaccaccgcgccgtactacgcctacgctcgcgctcagttccagttccccgcaggtaccgctactggcgtgttgtctgagctgggcggcgtctggtataacagcagcacgggtgcctacatccttaccacgcgggcgcttatcaaggactcctcgggcaacccgaccaccatcacggtgctctcggatgaaatcctagtggtgacctatgagctgcgcatgtacgtggacaccacaccggtggtaaccaccgaggttatcaagggtgtcagcaccaccgttacgtgtaagccaatcgcgctgggccgctccggttcactgagcggcgcgtcctcggtggcgtggtccgactacgtgtggggctgctactacttctacggcggtaccggtgacggcactggtgctatcaccgaccagtacccgccgggcagtctgaccagcttctcggacttgcagattcagtacgtgccctacgttcccggtacgtactaccgcgatgtggtctgccgtatgtcgatcaacaacgttcctccgggtcctatcactgccgcgcagggactcaacgctgtggtgccattccaagttggtttcaatccgggtgtcaccaagaccggatcggagacggcgaacctgcgcatgcgcgtttcgtggagccggtatacgccatgatccctactgtctcccaaagcatccaacgaggtgactgggtagagcagcagaaccggcgcacccgcccgctcattgacttcgagcagggcgggctatccctcaacgcagcagtggatgacctccaagctgcgctgtggaccgccgagagtgacggcagcagcgtcgtcgtttaccgcgacggcgttgcccctgtcaccgtgctgacggactcgggcatcacgcagatcgcactggcattcgaccagaccatgcgcccgcacatcgcctatatggcgggaggtgtgtgcaagttctactggtacgacacggtggccggctcaatgcagaccatggtgatccccggtgcaaccacgccccggctgtgcatggacgagaagcgagcgctattcgccacgcagagcgacgtactgctttcctacaagaacgggagcagcctgtgcgtgcgtgcacagcgcgagcgcttcgcaaccgaacacgtgatcgccaccggaatccccggtgacctgatcgcggttggcatgaacaacgtcaaccgcctgcaatggaagctcgtcggcaatcccgacgactggccttaacctacaggagaacagcatgaccccgccgagtgtggtcaatgaggtcgtccgaacctcgccgcttacgctcggcgcggtctacctcaacttcatcagcacgtatggtgctgccatcgtaactacgctcgccattctgtatgccgtcgcccagttctactggcgcgcgcgcgagcaccgcaagatcatgggagggaaggatgtcgaacccagcaagtgagggcgcgcttggcgcactccacgaactcgtcgccacggtactgaaggaacgtctcgccaacggcgagctgtgcaccgcagccgacatcaatgccgcgatcaagttcctgaaggacaacaacatcacggcaacgcgcgaggccaacaaggctctcggcgaactggaagacgaactcggcaagcactcgctgccgcaggccgacgacaccgagctgcaagcagcgctcgacaacatcgtgaactttccggggagcgtagccaaccatgcgtgaatcagccgaagcggcagacatccgtcgccgcaagttggagctgttgcagaaccactaccggcacttcgccaccttcatgcgagacatcatgaaggtgctggggttcgagccgacgtggatgcagtacgacatcgccaactacatgcagtacggcccgcacctcgcaatggtgcaggcacagcgaggcgaggcgaagtccaccatcgccgcgatctacgccgtcttctgcttgatccacgatcccacccaccgtgtgctgatcgtatcggcaggcggcacgcaggcatccgagattgccacgctgattcagcgcatcattctcacggtgccgacgttggagtgtatccgaccggacaagaacgcgggcgaccgcaccagcgtggacgcattcgacgtgcaccactcgctgaagggcatcgacaagtccccgagcgtggcgtgtatcggcgtcaccggcaacctgccgggcaagcgcgcggacctgctgatcgccgatgacgtggagtccaacaagaacagccgcacctcagcgaaccgcgagctgctgctgaccatcacgttggagttctccgctatctgcaccggcaagcccggcactccggggcgcatcctgtacctcggcacgccgcagaccggcgactccatctacaacaccctgcccggacgtggctacgacgttcgcatctggcccggtcgctacccgaccccggcacagcgcgagcactacggcccgcatctggcaccgtccatcgtacagcggctcgaagccgatcctatgttggcgttcggtggtggtccgatgggcgacgaggggcagtgcaccgacgagctgttggccggtgagcagaagcaccagtccgaactgcgtcagcgtggaccgtccagctaccagctgaactacatgctcaacacgcggctgatggacgcgctgcgtttcccgctgaagaccgagaacctcgtggtcattccgggtggcggcgaccgcttccccctgacgatcacgcgcggcctgagcaatgctcaccagcgcgcgttccagtccagcggctacggcttcgtcatgatgatgccgcacgacatgagcaccgagactgcacccgtgcagggcgtgcacatgcagatcgacccggcaggtggtggtgccaacggagacgagacggcgttcgccgtgaccgccttcctgaactctaccgtgtacgtgttggccgtgggtgctgtgcccggtggctacgatggcgatgggctgctcgaactgcgccgcattgcggtgaagtacaagccgaacgtcatcagcatcgaaaagaacatgggctacggcgcgttcgccaaggtgttcctgcccgtgctgcgagaagatcgcggtaccgagaagggatacaagggcgacatccgcgaggagttcgtgaccggcaacaaggaagcccgcatcatcggcacgctcgaacctgtcatggctcgtggctcgctggtcatgctggaatccgtggttgaaatggatcacgagtacacccagcgctacgcatccagcggaaagcgtcaggtctacagcctgttccaccagatggcgaagatcacgcagcagaagggcagcatcgcacacgatgaccggctcgatgcactggaaggtagcgtgcgtcactgggttgcgcagcttgcactggaccagaacaaggccatcgccaagcagcagcagcgagagttccaagactggatcaacgatccgaccggcatgaaggcggcgacccgaaagagtccgctgcaacgtggccgtccatccctactcgaccgttaccggaggtaacacatgcagaagtcagacttcaccagcaactacacgggcctgttcggtcgtggcaactacctgcaccgtgaattgctcgccctcgtggagcatgcggagcagcatcccgcaaccgcagcgcagctgctcgcccagttccagaaggacgcgaccctcgtgctcgacgccctgatcgctgccggtgcgcgcacgcagtcctcgggtccgaactccggcccgcacactccggtcgatctggacccggacgatgacccgctgaccccgtaaggagcaaccatgaaccagcagcagaaccaagataccagcaacaaagggctgttcggcctcgtcggcggcatcttcatcggcatttcggcaacgctgctgtcattcacccaaggccacgaaggggtacgctacgctgcgtacctcgacaccggccgggtgccgaccatctgctacggccacaccaagggcgtagcgatgggcatgacggcaacgaaggctcagtgcgacaagtggctgatcgaagacctacagatcgcccagcagggcgtgcgcaagcacctgaaggttcccgttaaccgcaaccagatcgacgcctacacggacttcgtgttcaacgtgggcgagaaggcgttcgcagacagcaccatgctgcgcaaggcgaacgcaggggatcgtgaaggtagctgcaaggagttcctgcgctgggtctacgtcggtaagctcgactgcagactgtccagtagccggtgctctggcattcccaagcgacgcgacgcagagtttgccctctgcctgcgccccaacaacgaggtgatccaaccgtggaaaccccaagtgaagtgatcgcgcgtctcagcggcaaggctatcggcctgctgctggtcgtgaccatgttcgtgtgcttcgggctgtacgtctacggcctgcaacgcaaggtggagaagctggaaactgcccaagtcggcacgaccgctaccgccaaggctgcgcagacgcaggccaccgggtacgcgacctatatcaaagagaaggaggacgtgcgtgttcgcactgaagaagctctcgacgccgttcccgagtatcgtgacggcactgttcctgctgatgtcgctgacctcctgcgcgaacctgccggttcccagtgatgatctgctgaaggactgccacatcacctacctcggtggtgagcgcggctcggcttccagtcaggacaaggtggtcaagctcgcgcaagaccgccgcatggacaccgttctgtgcaacaaggacaaggccgcgctccgtgcgtggaagcaagaggtgtgcggtaccggcaagcgccggtgtacgggtgaccgatgaccacgatagcgtgggacggcaagcacctgtgggcggatagtcaggccacacagggcgaccacaagcacaccgtccgtaaaatcctccctgtctcgacacccaccggcccagtgctgctgggtgtcaccggggatttcacagtgcttcgcccggttctcgctgcgcttaaagcgggcgaagattacatggagcacgtaggcaagtccgcaacggtgcttgtggttaaggacggcacactcacggtcactactggtaagcagcagtgggttgaggaggctccgtacttcgatggcagcggtaaggcgctagctctaggggcctatcatgcgagcaagtctgtggctaaggccatggctgctgcgatagctcacgacgtgtacagctccgggcctatcgtaaagctaaaggcaccagttcgcaaggctcagtcatagggcctcgtgggtagccggaccaaaatttgcttcacaattacgcgggggtcactccaatagaagctcccgcgcgtgcccccatacgcccctgcgcctgacgcgcgttggtgcgtgggcgggtgtgcctgcgtgtgtgcgcctgtgcgcctcacctgcgggcgcgagtcaatgcacgtgggtgtgtgcctgtgcctgcctgcgcgtggcgtgggcgcacgtgtgtgcgcttgcaggtgcgtgcgcctgtgcggccgtgcgtgggtgcctgcgggtgggcgtgcgcctgctgcctgtatggctggaccgtgctgccttggctgaatggttaataaatctctcgccgaaaggtgttgacgtggccgtcgtggtgtgatccaatggcgtcactgaggagctaccgcgacacctgcccagcaggcgcagcgacagggcttcaggagggccgcaaggggcttgacaggggctaccctacctgctaccatgcgaaccacagctgtaggcgtgtgagggccatctgtatcgtttcggccttttggtacacctatagcacacagtcggctcaacctgaatcaccgtctatcggtactctgtcgagctgataagttagctacccgctaggccctagcctcttgcatacgcaagacaacggttgacacacggccgcaatggtagtaagctgcaacgcaagtcaagtgacgtgatccgtagtggcgccgccaacaagtgggctaagggtacatgggagtcactggtaagggatgcgaggagctaccgaaccacgcttgacactaagctagcagtgagctatgataggcggcaagtgataggccaccggaacagcggagcagctagcctaacagcctacgcaagtaggcacaccttgcggactaccggcatacatggtaggatggtggcgacaggacgcccaacgggttagagactcgaatcgagccaaggggcttgacaggaagcaaacagggtgctagtatggcaccacgctctgaggagcaccggcactggaccgggcaggactaccgctaacgggtagggtgtaacgggaagccttcgggtagaccgccaagctgcaacgtagcactagcggataaccggatgaactgggatgtcaaaggcccacagaatccaccagactagcaacactggtgccgctttacctaggactaacgcctagggcttgcatctgccgtgagagtcggccacgcaagtaacctactgccaaggtaggaagccggtcataagcgggtggtgagcctgctatcagcgggcatacccgttgtttcgtgaaaagtctctttgggacacacggtgacaatggcactgctagccggagtagggttgacagcccgaagggctagcagattgatgcacactcacgttacatctaacttcccacctgacgccgcaagggtattggattgccgagggagacgactagggttgcgggtagtccctgattaggtgtttcgttcgcttctatcacggcacacattcgagtgtgatagctctttgtggagtgtgcatcaatctgttagttttcccaccagtgccaaatggaggcacgacatgcaaggctcgaccaataccaatctcgaacgtacccgcaccaagcgccgcttttgccagttcacccggactgcaagcgtgatggacctgcggaccaccgagcatgaccgcaagcttgccgagcgcaagctccaagccgaacgatacgaagcccgccacggaaccgctggaaagcgatctgtgtttgttgtcgagggcaacagcgggaccaatcgggcgaaccatgccgctgatcggagggcttacctgtgatccgaatcaagttcggccgtggccgcatgtacgacgctttcgagagctggcttcgggcaagggccaagcatcccatcggcgcggtaacgccgttccgtgaagtggtcagctgcgacggctgcaccatcatcgggtacacctacgacatccaactcgcctaatgcaagctactgggccttcgtaagagggcctagtgtcgtgcaatcggcacggacccaacctgaagggaaccaccatggacatcatcaccggaagcgctgacatcaagcgcgccatcaagtcgatcaacacggcccgcaccaagctggtcgatcagattcagcaggccgcgattgcggtcatcaaccacgcacacatccacggcgacgttacgctcgcttccgatctgtgtctcgccgtgggcaacggcatgaagcatgaggccctgcgcctgtacctgtccgagttcggcccgatggctccgaacgacgacaaggaaaccaaggcgagcgcgcccatgaagtttgccaagagcaagcgtgtcgagggcgaagcactggccgacgtgctggaacgtgccgccgcgaaggcgtggtatgacttcaagaccgagaagcccgccgaggcgttctctttcgccgccgacctgcacaagctgctgggccgtctggaaaaggcaaccgagggtggctatgtgccgaccgaggaggagcaggccgtcatcaacgctgcccgcgccgtcccgaagcccgccaagaaggtgcaggcgtaatgctgcccggcacccgcgtcgtcggagccggtgtgcgtgggtgccgctgtctgaccgagggcaaggaatacacggtcgaggactatcagcccgcctacaccgacccgacaagttcgagcggattcacgtggcctgcctacgtgggagtcatcaacgacgatggccgactcgcctactaccacacccaccgattcaaggagaaagcatgaacgtcgataccgacatcgcaatcaccatgccgagtgaggaagccgtgttgcttcgctcggcgctgcacatcgccacccgtctggccgcgctgctgcccgcagggtacggcaatcgcaagttctccgaccagttcggcaaactgcatgacgagctgcgggatgctggcgtggaaattctgcccgacaccgtgcagttcagcgagaacatcctcgactgcatgcgcaatgccgagcatcccgacgaccggctgctgcgcgacctgttcaagcagacgaccttcccgcaccgctatgggctgcgcggtgccgagctgcaagactggctgaccgtaggatagggcggcaggtctgtgatgtcggagctggacttcgccgctatcgaggcccgtgtgctggcctgcctgctcgatccgacccccgccgattgtgctggacgcatcgcagctgcctttcgagttcaagggtacggtgaccgggcgcaccgtgctgcccggctcggccatgccggacaacgtaccgcgcaagctgccggacgtgctgatggacgaccagagcgcacgccacgtggagctgaccgcatcgcagaccgggctggtgaacaaggccgagccgaagggctggatcgtgcagttcaatctgcgccatggcagcatcgccctcgccaactgggctcaggtgcgtgagctgggtctgcctcagcgtagccgcaatgctgcgtatcgtatgctgaaggcgcgtgcaaaggcacagggcatcgccgaggacgcctatcgtgtggtgcctgccggtactcccgatggcccggaaaaggatcgcggcttctacaccgccgagttcttcaccaagcatgcgatccggcagcaccagctgggttggcacacgtcgagtgcgcgtggcctgaacggtacgttcccgactgcgcaggccgcacgtaacgccatcgaccagcacgtgaaggacagcggcgcaaccgcgagccgctaccgtgtgaagtggcacaagaacgtcgcgtgatctaccgctgcgccttctaacgagggtgcagctttggaaccacgcccaacaggagggcaaattgtatgatccctatcgtttacaagcgcatccgtagtgggaagcgcaagccgttgcagttggcagagaggccgcgcaactggaaagagttcgtgacctacgagcacagcgtggagcgctggtatgcgtgaggtcagcctgcgttaccgtgtccacatgacgagcctgaagacaggcgctcagtggtacagcggtcagcacctcggcgcacccattgggtggacgttcgaggatcgagaagaagccgagtcatgggcggcgctggtcaagacaaacgaccgcatcgctgatgtcgaggagtacgaaatcccacccgtcaacaaggagaaccaccatgcgtaagctgtacttcatcacgtccatcccggccaccgcaaaggatggcgtcatcaccggcgtcgtcgccaatggcacgggacgcaacgccaccgccgaggaagtgaccacactggtcgagttcctgcgcgagaagggtgcgtcgcagtccctgctggatgcgctgcgcgacgccacctatccggggccggtgtccgccttcgaccgccgcgccgctgcccgtgccgaggccgcaaccctgaactcgttcggtggcctgttcaactggtccgtcatcgagctgggcgagagcgtgcgtcagccggtgcgcaagccgctgggttggcgcatcaagtacgacggtggcgaagtcagctgctacaacagcagcgaggacggcgctaccgtgcacatcgacggcgactccgagaaccagagctacgagaacctgctgttcccgacccgctcggcggcgcgcagcacggtcgaaaccatcggcgacaagcgcagccgcgagaacccgcacggttactacgtcgagccgtactatgcgtaagctctggctgcgcatactgatcctgctgtactggatcgtgggtcgtcgcccgtgggttgtcgtcggccagtaccatgacgacgacggtaagctgtgccggttccgcaccggcccggcttccaccgggttctcgctgacgttcgatgacctcgacgaagccaacgactactgcgaccagcgcaactggaaagcagacaccgacccgctcggcaccacgtactacgtgtggcacgagacggagttcaaccacttcggacacaggagaaagtgaccatgggattcctcgacaagatcaagaagggcgcgcagtacatcaaggacaaggtggtcaacgccatcattcccaagcgcgacgacgatgacaccacgccgccgcctcaggtggacacgagcaactacctgcacgtcagcgtgccgctgatccccatcgacaacccgatcctgcgcaagatgctggggcaggattacttccccgtgcagaaggggcagggtcagacccgcatcgtcggcaacaaccagctgaagcgcgtggccgatagcctcggtgccaacaacaaggaacgtcgcaagctgcgctcccgcatgaagcgccgcgccgccgagctgcgtgccggtgcatcgttgcagccgaacgtgcaggccgcactggcaggtgcagcatgagcctgcgaatgggaagctgggtcgaggtgaccgtgcccgacagtcggctgctcaacgtgcagccggagatttccgccgccgtcaagctgatcggtggtgcgacgatgaccaatgcccgtggcctgtacgtccgcaaggataccggcgcactggatgacgaggcggtgaccgtgatccgcttcgacatgaacttgcagagcgagctggtggaccagtacatgagcgccatccgcgccatcgtggaccgcctgctggtgctcggcgaggagagcgtgctgcgtcgtcgcttctacaatggcggcggcggttacaacagcgagctgatcttccagtaaatctcgcactgattgcgtgccggaagggaccacgttaaggaccacccatcaacccgtcaatgaaaggagatacaccgcatgtcgaacgaaaacaccaccgagcagaccaccctcagccactacgaagtcaagcgcgccgagctggtggaagacatcgccaaggcgcaggccaaggtcgatgcgctgaacgagaagctcgccaagctggatgccgtcgaggccaacagcgccgccatcgaagcgctgaagtccggcgacgccgtgtcctacctgttcggtcgtgccctgaacaagcgtgtcctgtccggcgtgatcgtcgccaccggcaagaacgacaagggtgtgctgcaactgaaggtgcagaccggcgaaggtctggatgccgagctgaacctgatcgacagcagcgccctgctgatgtcggccgaggaagtgctgaaggcgcaggaagaaatcgacgccgccgttgccgaggcccagcgtctcgccgccgaagctgccgccgcgaaggctgctgccggtgaaggcggtcagtcgtgagccgggccagcaccagcccgtcggtgccgccgaccagcgcgccgagccgcagccagttcaccgcaggccgtgacctgaaggtcggcttcaactaccgggcgatcagctccggcgcaggcgaagtcatcgacggcgacacctacctgctggtcaccaacgtgaccgacaagaagggcaatcgtcagctggtcaacaccagcaccggcgaggtgtccttcgccacgcccggctccatctggagctactgatccgacgaggatagcatgagcgatacccttcccgacaacgactggctaccacacgccgagcgcctgcctgttggtggccgcacacgagtggcccatgagtgcggggagggtacgcccttgctgattactcgtgagcatgacaagtccaccgcattctgtttcaggtgcggtggcacaggattcaagcgtgagcacgagagtatcgaggccaagcttgcaagaatccacgccgagcaaacgagcgagcgcagagtgcgcgcaactgttgagttgccagagccacgggtatacgacacccgcgagtggccgctcgacgctaaggtgtggttcttcaagatgggactctcgcttcagatgatcgacaagctgcggctgtactggtgcccgagcatcgggcgggtggtactaccgatcactgaaggcgacgacgttgtgtactggacagcacgaagcacaagccgtcaacccaaatggttgactcctgatgtgccgaaggatgggcttgtcgcacgctacggcgtgggcaagggggacaccatcgtgctatgcgaagacccgctatctgccttcaaggtgggccagtgcacagaagcgtggtcgttgctcggcaccaagctgcacaacaaggtgttgaagcagctgactgatcgaggccaacgtgtagcgacgtggctcgatgacgacagaggtagaagcaacggtagcaatcccggccaagacagcgcgcgagtaatcgctgcgcgtctacgtacgtttggtctggactacaggaacatcacgtcaccacgtgatccgaagtattacacgaccgactacataaaggagaagctgctgtgaaagaacgcatccgctggtccgcccggttccagcactggtatcacgtgtccagctgggtgatgtccggtcgtgaccgaagggcactcgacttcgtgctcgaactcaacaagctcaacggcaggaggaactgacatgagcgaccgatccaagtacgatcccgaggaggaaaccgatgagtcttgacaccacgctgctgcggttgtgcaccaaccgtggcaagttcgaccggctcgtgcccagtgcaccacgtgatgggctggacgagctgaccgtgctgatgctcgatgcgttgcgtgcgtactacaaggagttcccggacacgaaggacttgccgttcgatgtgttcgatggctgggccatggagttcaagtggaagacgcagcccgacgacaagaagtccctgctgaaagttctgctgaagcagatgcgcgatcctgtcccgcccgaagcagagcagggaatgatcgagaagctgttggagttggagcttgccaccactgcggtcagcaagatcgtgcagtggaatggtggcgctgagttcagcctgcgcgacgagcttgccgggttggccgagacgatcaccgaccgcatggatcgcaaggctcgcctgcctctggtgcaggagacgcccgaagaactgatgcagatggacgagcacgacatcggcatccacttccgactgcccacgttggcgaagaacctgcgcgcgctgcggggtggggacttcggcatctacgccatgcgtcccgacgcaggcaagaccacgttcctgacgagcgagtccagccactggatcacgcagctggacaacgtgtggccggaccagaagcgcaccggcatctggctcaacaacgagggaccgggcaagcgcatcaagcagcggtggtatcagtcgttgctcggcgctaccatccctgagatggtggagtgggcgaaggatggcagcatccgcaagcgcatcgaggatgcgatgggcggggacatccaccgcatgcagttctacgacatccacggattcaactccggcgaggtcgaggccatcatcaagcagaccaatcccggcttcatcatcttcgacatgatcgacaacatcacgttcagcggtggcatgaccaacggcggacagcgtaccgatcagatgttggaggcgatgtatcaggccgcccgcaactggtgcgtgaagtacgacgccgttggcgtggcgacttcgcagatcagcgccgagggtgagggtgtgcagtacccgccgcagtccgcactgaaggacagcaagacgggcaagcaaggtgcatgcgacttcatcatcatgggcggcaagctcaacgacccggcgatggaacgcttccgctacatcggcaccccgaagaacaagctgcaccgcgcaggcggtaagcgtgacgttcgggaagaagttatgatggatgcagagcgtgcccgcttctatcaggaggcagcatgagtaaggacaagattcacaccaacggggcagcgcaggttctgttcggcgaggaggcgtatcaatgcgcctccgttgcgcaagccaactacctcgctgccatgatgcgccgggtgcacgatgccgggtacatcgaaggccgcaacgacgcgccgcagtggaagtggggatggctgcggaacaagcacagcacttggatcggcgtgcactactcgccgcacaacaagcgctggtgcatcaacctgatcccatgcttcacgctgtggatcaccaagcccggaggtaacacaccgtgagtaccgaaccgaacatctacctgccgcgcaacgttggcgtcatcacgtccagccgtaccggcagcagctacaccgtcgagccgcccgtgaccaccacggacatcgactacctcgtgctggtgcaggacttccacgaggccctcaacaagctggaacaagcggggtggacggtatgcaccggacccgatgggcactacgaggaggacgaggactacagcacaacgtggtatgccttgcgcaatggtgtgttcaacatcatggtgaccgccgacagcggatggtatcagcgcgcggtcgaggccaccaccatctgcaagcgccgcaacatcaaggacaagcaggaccgcatcatcgtgttccggtgggtgcgtgatgggctggacttggatggcgatgcgtcggatgaaatgtaccagctggccctgcaacggtggccgctgtgagcttcacttccttcgaccttgaaaccacgatccgtgccatcctgaagcgcaaggccaatccgttctacgacatgaacaagatcgtagcgattggctacaagcgcaagggtgacgcacggaacaccggcctgtactacgacacccgcatcggcatcgacaaccagtacatgggcggcgcacccgatgggtggctgcgagagctgtgttacgggcagcagttcctcgtcgggttcaacatcaagttcgacatcctgcacgccatctgccaaggcccgctcaaccgtcaagcatggatcgagttcatcgacggcggcggcatggtgtgggactgccagcttgccgagtacctgctgcatggtatgacgcaagagttccacatggcgagcatggacgagacggctccccgctacggcggcaacctgaaggacgatgcagtcaagtccctgtgggctgcgggcgtggacacctgcgacatcgacaagacgctgctgatggattacctccttggcaccaacgacaccgacgacgtgggcgacatcggcaacaccgagaagatgttcctcggacagctcgccgccttccgtgcacgtggtggtctgcgctcggcgctgctcaacatgggcgcgctgtgcttcaccatcgaagccgagtacaacggcatgtacgtggacaaggactgggcgcttgcgaaggcgaaggagttggaggtcgagcttgcaacagcgacggccgaactcaacggcttcatccccgcactgcccgagggcctgaccttcaactggaacagccgcttccacaagagcgcgctgatcttcggcggcaaggtgaagtacacggcgaaggttccgatcatatccaccgagggtggcccgacctacgtgcagaaggacgaggtgcactacgtgctggtcgatggcaccacgacggcaacgccaccggccgaggacttcgacaacctgtggcggtacaccacctacggcagcggcaagaacaagggggagtacaagaccaagaaggtgaaggtcgatgacttgaccaagcagaagttccgcaacgaggacatgctgttcgagttccccggctacaccgaaccggatgccgcgtgggaaagcaagagcgatccgggtgtgtactccaccgccgccgatgtgatcgaggcgctgggctatcgcaacctgccgttcaccaacgcactggctcggcgcgccgacatccacaaggacttgtccacgtactacatcacgacggacgagaagaccggcgagcagaagggcatgctcacgctggtgggaccggatggtatcatccaccacaagctcaacatgaccaacacggtgacgggtcgcctgtcatccagcgatcccaacttgcagaacgtgagcaagggtgagctggacgaggagacgttggaggagaagggttcgcagatcaagcgcgccttcgtgtcccgacacaagggtggcaagatcatccagtcggactacacctccctcgaaatctacgtgcaggcaatcctcaccgagtgccgtcagctgatcgaagacctgaaggcgggcctcgacatgcactgcctccgtgccgagcaggcgtggggcgagcagggcaagtacgactacgacttcatcctgaaggcgagcaaggacgacaagcatcccgagcacaagaagtggaagaagaagcgcggcaacgcgaaggtgttctccttccagcgtgcatacggtgcaggcgtggcgaagatcgctgcgaccaccggcatgtcggaggaggaagtcgaggcgctggtgcgtggtgaggccgagcgttacccggagctgggtgcgtacatcgaccgcatggtcgaggccatcaagcgcaaccgcgtgagcaccaaccgcttcgtgccgcacccggacgcaggtcgtcagggcgtgcctgccgggctgacctgtcagctgggccggtcgcactggaccacgccggatggcaagatgtattctttcagcgagtcgccgtctccggtgttcatcgccaacaagcccgcgagcaagggcggctgcgcgcagtcgttctcgcccacggaaatcaagaactacccgatgcagggcaccggtggtgagtgggccaaggctgcaatgtacgtcagcctgcgcgctttctaccgcaagtacgtgaccgaaccgaaggaatggttgggccgtgcgttgctcgtgaatcaggtgcacgatgccgtatacgtggacagccacggcgacatcgcaaccaaggccgctgctctgctgcacgcctcgatgctggaagcgtcggtgtatatggagtggtggttcaactggacgctgccgcttggcgtcccgtgcgaaaccaagatgggcgacaacatgatggaggagaagaaccctcccgcagagttcgccggtctggtcatcgagtaccgagcgtcgatccgcaaggacttcgtaggtaatcacaacccgtcgtttgaataaggagaaccacacgcatgagtcttgacgcactgttgaacaaggtcgccacgcagggcaaggaccagtcggtcgccagtggtggcaacttcgactacaccccgcccgctgccggtgtgaccaccgcccgcatcgtcgggtactacgagctgggcaagcacgagttcgagttcgagggcaagaagaagacgcaggatgaagtcgccatcgtgttcgagctgaccggcaagcagcacccgcacatcgagacggacaacggtccggtaccggtgcgcatgacgctgacgctgggcctgtccaccaacgagaaggcgcactacttcaaaatcttcagccgcctgcgcaccgacgagcgtcacttcgtgcagctgctgggtcagggtgtgctgctggaagtcatccacaagccgggcaagcgcgacccgaacaagaccttcgccgaaatcgacaaggcttccatccgcaagccggtcatgccggtcccggaaatggagaacggcatcccgactggcaagttcgtggacaccgtgatcccggtcccgcagcagatcaccccgctgggtgcgttcgtgtgggacttcgccgacgccgacatgtgggacagcatctacatccccggcgagtacccggaacgcaaggacgagaagaccggcaaggtcacccacgaggcgcagtcgaagaacaagacgcagctgcgcatcgctgcggcgctgaacttcaagggcctgccgtgctacgactacgccgccgccaagttggcgggcagcagcacggtcaccaaggaaggcgtcgatgctctggacgaagcggtcggcgacgtggcgaacgccgcgcccaccgattctgctccggccgacaacaagccgccgttcccggtggatggtagcgacccgatggcgggcatcgcctgatggacctgagcgctctcatggctgcggctggtgagcgctccccgatgccggtgcaagtggtacgtcagcacaacccgcgcgtgatcgctcacgttgacggggactacatggcgtacttcgcggctggtagcgagaactgctcggcgggggatgcacgacgcaacgtgctctcccgctgcgcacagctgaagcacatcagcggagcgggcaagatcgtgatgcacctgacgcacgccgcgtctaccaagggtgatcgcttcctcgctgctaccacgcagccgtatcagggtcagcgccaagcaggccgcaagcccaacaactgggcgttccttcgtgagtggatggagacatacgagggcgacgctttcactcccaaaatctggctgacacgtgaggccgacgacggcatcgcatacgtcaacgagggtgcggcattgcaccacaacatactgcacgtggtgcacagcgccgacaaggacatgcgaatgttctgcggcgtgcacgtagactgggatggctacggcatcaccgaggttccgctcggcgcttacgacattgtgggcgagaacggattgcagtacggtcacaagtggttctggatgcagatgctccacggcgacagcgctgaccacatccccggactgcccgacgtgggcaaggttacggcggagcagctgctgttcggcacggagaacaaccacgaagcggccatgctggtgcgcggcaagtacagcgaggtgctcggtgccgactggcgcaagaccttcgccgaacaggccgtgcttctgtggatgcggacggatcgtgacgctgaactgctggacgtgctgaagctcgacgtgttcgggccgcagctgaagcaagcattctacgacctcgccgaggacgtgaacgagaagcgcgcaatcttggaggcatacaaagcatgaagcgactcactgcaacgcaagtcaagctgttgcgcatcaagctcgcagcggagcaaggtaaccggtgctgtctctgtcagggacagttcggcctgaaggctccgctcgatcctgttatggaccatgaccacaagaccggcgctgtgcgcggggtgctccatcgcggatgcaactcgctgctcggcaaggtcgagaacaacgcaggccggtatggcgtgcgcgatgtgttcgcattctgtgcgggcatccccaactacctgcggtcccacctcaccaacatcacggggtacctgcatcctacctacaagaccgacgacgagaagcgcatcgctcgcaatgcgaaggcgcgtaagcgacggtcactcaacaaggagacaccgtgacccttacccagttcattcgccgagcaccgaagcgcggcccgaagattctctgcctcgacatcgagacgttccccatcgagttctatggctgggggatgttcaacaacaacttcagcgtcaagcagatcaagcgtgactggtcgctgatgtcgttcgcttgcgaatggctggacgacgaggagtcgttctacatggaccagcgcaacgtgcgtgacgtgttcgatgaccgcaagcagggcaaggcgctgtggcacctgctcaacgccgctgacttcgtgctcgctcgcaacggcaagaagttcgatttgcgcaagatcaaggcgcgcctcgccatcctcggcctgccgcccgtgtcacctgtgcaggtgatcgacccgatgctgctgaaccgcaccgagttcgcgttcacctcgcagaagttggagtacaccaccggcgtgatcgtgccggagctgcgcaagtacgaccaccacaacttccccggcttcgacctgtgggtggcctgcatgcagaacctgcccggtgcatgggacgagtgcgaagcgtacaaccgcatcgacgtgaagtccatgaagttggagtacaagaagctgcgcggctggtactcgcagcacccgaacgtcgccgtgtactacaaggccgatggcagcgagcaccgctgcaacaagtgcggctgcaacgaaatgatcccgcaggatgatccggcccggacacaggtcggcacgtacctcctgcttcagtgcaccgtgtgcgatggctacagccgtgggcgcaagctcacgaccagtgccgaagcgcgcaagcacatcaccgtcccggcataaggagaagcgcatgagacttaccgacgttcgccacggcgaccgtgtacgctacaccggctctgctccgggcctcgtcggtaggtccggcgtggttcgctcgatcagcgcagcagatgttggtgtcctgttcgacggccagctgtacgactccacaatcaagccgcagttcctcactcgcctgatgggcgtgggaggtgtcaccaccacaaggagggaggttcccttgcccgaacaactgaactaccggaacgaggacgagcgcacgatgtccgaccgtggcgtcggcctgaaagatgacggcggcaagccgcaggctcggctgctgcacgagggtgtgccgcgtgcactgtcccgtgtcatcgacaccctgaccttcggtgcgaagaagtacaaggcgcactcgtggcagcatgtcgagaaggcgctcgaacgctatcaggatgcgagctaccgccacgacaacaagcgctgcctcggcgagaagctggacccggagacgggcatccaccaccgtgcgcaccacatcatcaacgagctgttcctgttggagctggaactgcgcgaggaggagaaggcccgtggcgcagagtaaggggcgctcgatcaaggaggcgtgggtcaacatcgccatcggctacagcatcaactactgcgcgaacatcgcgttgctgccgctgctgtggcatccagatcacccgctcatgtcggcgcacgccatcggcgttgccttcacgatcatcagcttcgtgcgccagtacatcatccgccgctggttcagcaagggtgactgatgacctgcgcccgctgcggccaagtgcatcggtacgtcccacatgaggccgagtgggcgcgcttcctagaggagcaccgtacccgcaagcagttcgatgtcgagtgggctaactcactctggcatcgtacataccctgacgacgccttctgcatcctcgtgatgaaggggcgcgcaggtttcgttccattcccgtcgaaggagaactgaatgctctacaagaaccagaccgccatgctcatcaagtcctacgagaacgccgttgcgtggggcgagagcgccgaccacgaggaggcgttgcagaacgcggtcaaggcagggttcccgaacctgccggaagaagatcaggcggagctgtacacccgcatcgccgaggcgtgggaaggctaccgtggttcgctcgctccgcgcaagctgtggatcggcaccatcgtcaaccagttcatgtcgtcccgcaccgcacgcttcaacgctgcgcttggcgacggcagcaagaaggaggacagcgccgatgtttgacatcaagcgggataacgtccgggttgctcccggatacaagaagcgcaagcgcgggttcaagatcaaccgcgccttcaccaaaggcaacttccgcgtgcagtggtacgacgggaaggccacctactgggagcagtatgtcccgtggtacaaggtgccggtcaccatgtaccagatttggagggaccacgcatgagctacatcgtccacaaggcagtcgagcaggacaagatcaagaagaagctccggcccaccgaggagcagctgcgcaccgagtacatcgcacagccgaagtacgacgggtgcaacatggtcgccatcaagcgcggccactgggtgcccaccgtgaacaagggcctgcatgccatcaaggtcggcgacgtgcagatgcagccggtggatcgcggtgtggtggacctgttctcccgcaccggtgagcaggtggtcagcgcgcaccacatcgagaacgctctcgcctccgcgccgttcttcccggtcggcgtgtacttcggggaatactggcacccgcaaatcgaccagcccaccgtcagcggcatgttccgcaagaaggacggcacgcagtacaccgagccgatgttcgtggtgttcgacttcgtgacgctggaagaatgggagcagggctacagcgacctcgtgtatcaggagcgagtgagtcgcctgccgagcatgggtcatgccatcgccgagggcaccgcgcctgtcttctacgccgagtcgcagggtttcctgatcgaccaagagctgggcagcatggaggcggcgaagctgctgtgcgagggcggcgcatacgacggcctgatcctgcgcaagccgagcggcaagtgggtgaagggcgacaagggcacgaacggcgaagtcgtcaagatcaagcctaccctgacgctggacctgcgtgtgctgcgcatcggccgcgctgtcggcgagaagaccggacgcgatgtctacaccgtgttcgtggacctcggcgatggcaaggagcaggaggtcgggagcggcgtgccacaccagctttcgcaagttcccgtcgtcggcgacatcgtggaaatcgaagccatgtccttcagcaagtacggcctgctgcgcgagccgcgctacaagggcatccgccatgacaagaaggaggccgaccggtgagcaacgttcagaccgaagtgtggcacaacatggagcgcgacacggtggaggtgcgagtgagcatcccgttccgtgattacgccggttccctgtggccgaacgagacggtgcgcgaggcggtgatcgaatcgctggaccgcttcctcgccgagcggaggggctgatggacattcgattcggaaagcccgagctggatttcgacggtgaccgcttctctccctacggtggaggccacgtcaccgttactgccaccgcgtggtgcggcaccgagcagttcttcaaccgccagtgcatcccgagctacgaggtcggcggtcctgcgtggccgcacatcatcaacgaaatgcacaccgcactggtctgcatgatcctgaagcgctacccgccgacggacttcaccatcaagcaacggaggtagcatgctctcgcaagtggaactcgaactggaaacctacgccttcggtaaggagcgcatggagaagtccatcgctcgcaacgaggagaagggcggcgcggacaacaacccctacgcccaagcagtgtatcgccggttcgtgcttccgcttgcggagcgcatccgtgcggacatcgactccccgcgtatcggccgtgcccaagcgcacgtgccactgctgcgcgccaagtacgatcccgagcgtcagaacaagcgtgggcaggccgtgagcgccgaggaacaagcccgcgagtggtacgaggctgtggccttcgtcgccgttcgcggtgcccttacctcctgcatgcgtgacaagcacggcgaaggcagcgaccgcgacgtgctgaagaacgtgggcatcaacgtgtaccacgagtacctgctgacacagttcgccgacgcagagccgactctgttctaccacctgatgaacgacatggaccgcaagctctctgtcaacgagaaccaccgcatgacggtgatgaagatgcagggtcgcaagaacggcatcgagttcgtggagtgggggcaggcgcagcgcgatcaggtcggcgcatacctgtgcgaccagcttgcacagctgggcatgttggagattggcgtggtaacggagactgcggccagtgccggtgcagcgtaccgtaagttccagaccaagacgcacgtcaagatcgtactgaccgacgaggtgcgcaagctgattacgcaaatcagcgacttcgtgatcgaggccacgccgttctatctgccgtgtgtcgagccgccgatggactgggtggacatcgacaacggtggattccacacgaaggaaatgcgccgactcaatccgtggatggtgaagacctacgctcagactcgggacgagtaccgcgctgccgagctgcgcaacgagatgtccgcgatcaacgcattgcagcgcgtgccgtggcgtatcaacaagcgcctgatggaagccgtgtcggccatcgccaaggtgcacgacatggaggaaatcatttcgcaaggcgagctgccgaagccgcgcaagccggagtggctgacgaaggacatgaccaaggaaaccatgtcccacaatcaggagttggagttcaagcagtggaagcgcgacatggcgaattggcacaccgacgagcgcctgcgccagaacaagggaaaccgcttctacaacgcaatgaaggtggcgcgcaagttcgccgagtacccgagcatctacttcgtgtacttcgcagacttccgtggccgcaagtacgtgcagaccaccggcgtatcgccgcagggttcggacttgcagaaggcgctcttggagttcgccgaaggcaagccgctgctgacgaaggatgcgaaggattggttctgcatcacaggagcaaaccgatggggctacgacaaggcgtcgctgccagaccgagtgaagtgggtgcgcgagcatcacgaccagatcatggccttcgctgcggacccggtgaacaacgacgagtggaagacggccgacaagccgttgcagtttctgagctggtgcatggagtacgagcagtggcaagtattcggggatcgcttcctgagccgcatcgcagtcggcatggatggttcgtgcaatgggcttcagaacttctcggcgatgctgcgcgacgcagcgggcggggtggcgacgaacctgatcccggcaccgctgccgaatgacatctaccagatggtggcagaccgcgtgactgcgatcctgctgggcgaggaggaggatgccgaagggtaccgcacgctgtggctcgaccacggcctcacccgctcgctggtgaagcgcagcgtgatgaccctgccctacggctcccggcagtcctcgtgggcggacttcatcatcgaagactacctgaagtgcgggaagttcccctcgctcgacaaggccctgtatggcccagcagcgcgcttcctgagcaagcgcatgggtgaggccatcgccgacaccgtggtcgccgcagcgggcgcgatggagtggttgcagcgcggctcgggtgcgatcctcaaccaagggtacgaccgcatccggtggatcacgccgtctggcttcccggtggtgcaggtgtactgggaatccgaggagcaccgcatcaacaccaagctgtgcggcaacgccaagctgtccctgcgcaagagcaccgacgcggtgaagaagtcccggcaccgcaacggcatcgccccgaacttcgtgcacagcctcgacgccagccacctgacgttggtggtcaacgcggccaaggccgagggcatcgacgccttcgccatgatccacgacgacttcggcacccacgccgccgacagcgcggccctgtaccgcatcatccgggaggtgttcgtggggatgtacgagcggcacgacgtgctctcggccttccactcggcctatccgttcctgccggagccgccgccgatgggcgagctggacctgcgccaagtcattgattctccgtacttcttcagctgacggagtttcagtacacctatagcacacaggccaaccgaggtccggttggagcggccgcgattgtaagcggaaccggtgccggaccttttggtacacctatagcacagaggagacaccatggccgaagacgccaaagtgaaagtcctgatgacgctccacccgaaccagcttgccgccgtgcggcgactgtccgggctgtcgctgtccgtcaactcgaataccacgcccttggaggcaggtatgcagttggggatggcccgcgtcctgaacatcttacaggagggtttcaccgttgatacctccgtaccgaacaccaacgacgggtgatagtgagcagatcaaggcggctttaacggccgctttgcatctgtcatctagagaagatagtaaggtagacaacagagaatcttctgtaagctacaactgtgatgatcctgattatacagtagctctgataactcagaacttagtagatgcagtaatcatagacgaagcctac

SEQ ID NO: 54 - protein, 847 aa, unidentified
  REGION 1..847: note = the amino acid sequence of tail tubular protein B of abacteriophage
MSKTVGSLPSLVQGVSEQEPHNRAPGQMWESVNMIDSPTKGKARRRGTVYSDHIELPSAIAAALVEARSQTEYTFIIDGREYSLIYRSRASTLGKDYFAQLLDKESGKFFDIVYEGSTWIDNLISGGVSAIACIGRYVYIAGNTTLPRATSTESWNSPDNLQKLAAWVREGAYSRKFTLVLYHVNGTKVEFAYTTLAAAYPELLDTTDIPFYKPGSNPQTADPEYQKRVNDRVNAYEGEKTAWIRKAAEDIVPANIAAKLAELAAQAGIIASSIGPCVVVDDPNYNDIRLLDDASNTLVSYAGREVSDPQFVTLYHWAGKIVRVRPSGGGDKESYYLKAVALEEGAVGWTKVEWVETAGVVHEIHNVVSQMVIDPALKTAYIAQNGEGLKSLAPQLGDHPVYKQNVVGDAVTAPLPHYFGRVITCMTVFQDRLMISADNIVNFSRSSDYLNFFRVTILNIQDNDPIEIFAHGSEGDTIKRAVMFERDLVLFGELRQYAINGREFLSPTNPNINVIGNFEGGVRAQPIASGNFLFFGKHANERTGLHQMQPGETAQTTIVYDVSQVLDTWLTGEPVQLLGTTMPNMITYRTDADPSIWYTYRYADEQGTGRVMASWGKQQYAPELGTVAAITHYRGDLFVITLRSAGGKDYWFADKLSLNVDMPRYPHLDSQVRYGQETSWHAAAASKLYVAADKSSDYFLLGAPRAGAAEFVEQAPGVESALVVGSVSPAYFQPTNPYMRDSQGLPILNGRITLTSFGFHLADTGGLRAYVLKPDRERTLLFEGRVIGHSSNIIGRQPVFSGIRTVSVGRETRTCIIELRSEDWQPLRVTGAEWSGQVFMPRARGLY

SEQ ID NO: 55 - DNA, 2544 bp, unidentified
  misc_feature 1..2544: note = the nucleotide sequence encoding amino acid sequence of tailtubular protein B of a bacteriophage
  source 1..2544: mol_type = unassigned DNA
atgagcaagaccgtaggcagcttgccatcgctggtgcagggcgtatcggagcaggaaccgcacaaccgtgcgccgggtcagatgtgggagagcgtcaacatgattgactccccgaccaagggcaaggctcgtcggcgcggcaccgtctactccgaccacatcgagctgccctcggccattgccgctgcactggttgaggcgcgctcgcagaccgagtacaccttcatcatcgacgggcgagaatacagcttgatctaccgcagccgcgcatcgacgctcggcaaggactacttcgcacagctgctggacaaggagtccgggaagttcttcgacatcgtatacgagggttcgacgtggatcgacaacctaatctccggcggcgtgtctgccattgcgtgcatcgggcggtatgtctacattgcgggcaacacgacattgccacgcgcaacgtctaccgaatcctggaactcgcccgacaatttgcagaagctcgcggcctgggttcgcgagggagcgtacagccggaagttcacgctggtgctgtaccacgtcaacgggaccaaggtcgagttcgcgtacacgacactggccgctgcgtaccctgagctgctggacacgacggacattccgttctacaagccgggtagcaatccgcagacggcggacccggagtaccagaagcgagtcaacgaccgagtgaatgcgtacgagggcgagaagaccgcctggattcgcaaggcggcagaggacattgtgcccgcgaacatcgcagccaagctcgcggagttggcggcgcaggcaggcatcatcgcttcctcgattggcccgtgcgttgtcgtggacgatccgaactacaacgacatccgcctgttggacgacgcgagcaacacgctggtctcctacgctgggcgcgaggtcagcgatccgcagttcgttacgctgtaccattgggcaggcaagatcgtgcgcgtgcgcccgtcaggtggcggcgacaaggagagctactacctcaaggccgtagcactcgaagagggcgctgttggctggaccaaggtggagtgggtagagactgccggtgtggtgcacgagattcacaacgtcgtgtcccagatggtaatcgatcctgcgttgaagactgcgtacatcgcacagaacggcgaaggcttgaagtccctggcaccgcagctgggagaccacccggtctacaagcagaacgtggtaggcgatgcggtcacggctccgctgccgcactacttcggtcgcgtgatcacctgcatgaccgtgttccaagaccggctcatgatcagcgcggacaacatcgtgaacttctcgcggtcgtcggactacctgaacttcttccgtgttaccatcttgaacatccaagacaacgaccccatcgagattttcgctcacgggtccgagggcgacacgatcaagcgggcggtgatgttcgagcgggacctcgtgctgttcggcgagctgcgtcagtatgcgatcaacggacgcgagttcctgtcaccgacaaacccgaacatcaacgtgatcgggaacttcgagggtggcgtgcgcgcacagcccatcgcctcggggaacttcctgttcttcggcaagcatgcgaacgagcggacgggcctgcaccagatgcagcctggcgagacggcacagacgaccatcgtgtacgacgtgtcccaggttctcgacacgtggctgacgggcgagcctgtgcagctgctgggcaccaccatgccgaacatgatcacgtaccgcacggatgcggacccgtcgatttggtacacgtaccggtacgcagacgagcaaggcactggccgcgttatggcaagttggggaaagcagcagtatgctcccgagcttggcaccgttgcggctatcacgcactaccgtggcgacctgttcgtaatcacgctacgctcggcaggaggcaaggactactggttcgccgacaagctgagtctcaacgtggacatgccgcgctatccacatctggactcccaggtacggtacggtcaggagacctcgtggcacgcggcagcagccagtaagctgtacgttgctgcggacaagtcctcggactacttcttgctgggcgctccgcgcgctggtgctgctgagtttgtggagcaggcgccgggtgtggagtccgcacttgtagttggctccgtcagtcctgcgtacttccagccgacgaacccgtacatgcgtgatagccagggcctgccgatcctcaacggtcggatcaccctgacctcgttcggcttccacctcgccgacaccggcgggctgcgggcgtacgtgttgaagccggatcgcgagcggaccttgctgttcgagggccgtgtgatcgggcacagcagcaacatcatcgggcgacagccggtcttctccggaatccgcaccgtaagcgtaggccgcgagacgcggacctgcatcattgaactgcggtcggaagactggcaaccgcttcgcgtcactggcgctgagtggtccggccaggtattcatgccgcgcgcacgagggctatactga

SEQ ID NO: 56 - DNA, 43336 bp, unidentified
  misc_feature 1..43336: note = the genomic sequence of a bacteriophage
  source 1..43336: mol_type = unassigned DNA
cagtgtacatcgcagtgcaactccgcactatcaaggagaatgaaatgtcccagctgttcaagcgttatgaagtcagcaccatcaacaacgaccagctcgtgcagtcctcgccggtcacgttcgccgcccacctcaccgagaagcaggttcgtgcacgtgtcgccgaccagctgcaacgccgagtcgaaagcgtgctgctgtcgaacccggtcatcgtggagctgggctaatgcacgacctcatccaccaactgtcgaacgtaggcatgaccgtgctggtcatcgctctgctgttcatggtgctgctcaactggcgcatcgcagtgcagctcccgctattcgccgatggcctgttctatctggaacggcagagctacgcacggcgtggtgccttcggcctggtgatccagcgcgaggcacggtgggcatacgctgtgttcttgctgggcacgctgatgctgtggccggacatcgtgttccacctgtggtacctcatcggcaagctgttctagtgtatggccttcgccttcgagtaccgcgacaaggacgggtacgtcacccgccgtactgtggaggtggcgcagtatagtgcggagcatctgattgggtactgccagttgcgcaggtcacgacggacgttccgcattgaccgcatcgttaactcggaagtcatcgacacaaccacaggtgaagtcatcgacgctaccaccggagaaataaaatgagtcacctcgcgcctgacgagtggttgccgcaggctgagcgcctgttgattggcggccgcaagtcagcgcgcggcgaccatgcatgtggtgaaccgggctccctcatgttgacgcgcgagggagcaacgctcactgcctactgctttcgttgcggtggggtgggcaagcatactacgcaggaagatcccaaggaaaagttcgagaggttgcagcggcaggcagtggcggatgagttcatgcgtaacgcagtggaaccgccggagccgacgacgtacaacccggccaagtggcccgagcgtgatgcgttgtggttctatcgaatgggactctctccccgcaggatcaaagaactagggctgtactacaacgctgagtccgggcgtgtggtactaccgatccgcgaggatgatcaagtggtgttctggatggcacgatcacagacggccaagcccaagtgggtaggcccgagcgtgaagaagcgtgggctgttcgccaagtacggacaagcgcgaggcgactacgtggtgctgacagaagacccgctcagtgcatacaagataggcttggtgtgcgaggcttggtcactgctcgggacgaaggtgcatagtcgccacgtcttgcagctgatggaacttggtaagccagtggtggtttggttggacgacgaccacgaccactacaccggcaagaaccaagggcagatagcggcgcgccaagtgattggtgtgctgcgtggtgcgggcttggaagtgcagaacatgaccagcccgaatgatcccaagtactactcacagtaccaactaaaggagatgatgcaatgtctttccgtgccgcaatcaaacttgaccaactacaggacaagctccgcgcaatcctgagcgaccacgatgcgtgccttgtcacgaagaacaccgtgtacttcaatcgcttcgatgtgcagggactcaacgaggcacttgaagttccgaaggaagtgcctatgtacgaggtgaacgaagtgcacagcacgaagttcccgacctgcccgccacgatacaacgtgactcggacatacaagggcaagccgcagttcgccgcaggcttcaagagcaaggcggatgccgacgagtacacgaagcagaagaacgcggccgctgcaagcgaggtggcggatcgctacaagctggagcaggtgagcgccacttggatctacgtgcgggatacctccgacaaggggctgatcagttcggtggttgccaagttctctaccaagcacgaagcgatggcgcgagaactcctcaagcgcatgaacgcggagtaatcaatggagcgcagcgagcacaccttgctgcgcctcgggctggatcgaaagacccacaccaaactgttcgacatcatccccggctctgcgctgacgggtaatgtgcttactctttgggaggcgcagcgtaagttctatgccaagttcaacacggacaagatcaccgacatcccggcatggctgacgtggcttgaggaccaccagttcgcaacgatgaaggacccggatgcgaaggagctgctgctcactatcgcgggcaagctcaagtacggacccatcgatgagtccatgatcccgcaacttgccaacggctacatccaaacggcgttgagcatggaggtgatggacatcatcgagcggttccagtctcccgacaacgaggaagacctggacgtgatgttggtcgcagccaacgagaagtacaagaacttgatggagcgcagcgttcagtcgcccatcgagagtaccagcatggacgacctgtacgaacaggacagcatggagtatgggttcaagtggagactgcctgaactcgcacagcacatgcgccccgctcgaccgggcgatgcaatcgtgtgggctgcgcggcctgaccgtggcaagaccacgaccatcgcaagcgagatgagctacatgattccgcagatggacctcgtgtatcctgggcagaacaagtccttcatctggttcaacaacgagggcgatagcaagggcatccgacgacgcttgtatcaggcgttgctcggtgtgccgcagtcgcagatgatggcgtggcacaaggatggatcgctgctcgacaggctgcacgaagcagcaggtggcaagcatctgttcgaccgcatcctcatcatgtccatccacgggtatagctcgggccaagtcatgcgcctgatcaaggagcataaccccggcctgtgcgtgttcgacatggtggacaacatccgcttcaatgggctgagtacgaacggcggtacacgtacggaccagatgcttgaggagatgtacaagtgggtgcgcgacgccgcaatcatcgaaggcttcgctgcctttgaaacctcgcaggtatcaggcgatggagagaacgtgcagtacccgctaatgtccatgctcaaggacagcaagacaggcaagcagggtgcgtgcgatgctatcgtaatctggggtgagcagtccggcaacgagcgcggaaggttcctcggcatcccgaagaacaagctggtcgttgaaggtcagcctatgaacccgaagaaggagtgctacttcatgccggagattgcacgcatcctgtcattcgatgaagtcaacgaggagtaaccatgagctactacgaacccgaggaagaaaccgatgagtcttaacagcgacaacgcaacgcaggttcgtcacctgtccgaaggactgttccgcagcctgggcaattacacagcccagaggcagcattcctacagcatcccgcactcgaacttgtaccggtggcgtgacacgctgaggaagattggtttccttagcacgaccaagtatgagccgaggcgcaaggtgcagctgctgttcaatcgccacgcactgtgggtcggcgcgcactacagcaagtacaaccgcaggctgtgcatcaacctgctgccgggcgtcaccatctgcatcacacaggcaggcggcatcgctccttaatcaaccgaggatcaatcaaccatgagtaagtacctcgcatgggacatcgagacagggatcaagcgtgcgctcaagcgcaaggccactcccttctacaatgagaacctagtgtgggcgataggctatcgcggatctggcgtgctggataaggtgggcttccatcgcggagtcgatggcataccgcacaactacttcccggacatgctgagcaagtgcaagatcctggtcgggttcaacatcaagttcgacttgctccacacactgcaagagccacagaactacgaggcgtggaagcgctgggtcgtggacggaggcatggtgtgggactgtcagcttgctgagtacctgatcgaaggcatggacaagaagtggcacatgcccagcatggatgaggtggcaccgaagtacggcggcaacctcaaggacgacgcgatcaaggcgtgctggaacaacggcatcgacacgccggacatcgaccccgacatgctgatggactacctcatggggaccgacgagcctggtgatctgggtgacatcggcaacaccgaggcgatcttcaagggtcagctcgacgtgctgcgtgcacgtggcggtatcaagtccgcgatgctcaacatgggcgggctgatgtacaccgtcgaggcagaactcaacggcatgaagatcgccgaggctcgggccgaggagctgcgcgttgcactgctcggtgagcttgaggaggtgacgcagcgagtcgccgcctacatcccatcggacctgccgttcgagttctcttggtcgtctcgcttccacaagtctgcgctgctgttcggtggtgacatcaagtacaagcagcgcgtgcacaaggaggatgaccagggcaacaagctgtacgccatgtcggacgaggtgcactacctgctcaaggacggcacgtcgaagaccgaggaggagatgaccgattgggattggggcaacgccgagcggttcgccggtggtgctaagaagggacagcccaagaccaagaaggtcaaggtgcccgaccttgccaagcccaagatgacgaccgaggaattctactacaagttccccggattcgttgagccgctcaagtcatgggcgagcagcacggatggcgtgtactccacggcgagcgaggtcatcgaggcgctgggtacgtgggaagatgcgccgcccttcatcaaggactacgccaagcaggcgaagatcgcgaaggatctatcgacttactactgggtcgaggacgaggacggcaaccgcaagggcatgctcgcattgctcgggccggacggtatcatccaccaccagctcaacatggtgaacacggtgacggcgcgcttgtcatcgagcgatccgaacttgcagaacattccgaagggtgacaagtccgacgttaagacagtgttcgtctcccgcttcgagggcggcagcatcgtgcagtcggacttcacctcgctcgaagtgtatgtgcaggcgaacctgtcgctcgacaagaacctgatcgccgacctcaagaccggcatggacatgcactgcgtgcgtgtggctcaggctcacaagatggactaccagtatgtgctggaacgtgcgaaggatgaacaccaccccgagcacaagaagttcaaggcgctgcgcaacaaggcgaagaacttctcgttccagcgtgcgtatggtgcaggggctgctgcaatcgcagcagccacaggcatgacggtcgaggaagtcaaggcactgatcgaggcagaggagactcggtaccctggtatcgtgcgctacaacgacagcaacttgcgcatgctcgaacgcaatcgcaagccgtcgtctctgttcgtgcagcacgacgaggttcgcggactgactgtcaacctcggcaagtcctacctcaccacgcctgacggcaagcgctacgtgctgtgggaatcctgctctccgaagttcgtgtatgagcgcgaaggcaagacggccacgttcaagccaaccacgttgaagaactacccggtgcagggcatgggtggtgagtgggccaaggctgcgatgtggctgctggtgcgtgcgttctacgagcaggacaactacggcggcaaggcgctgctggtcaatcaggtgcacgacgcagtgtatgctgacgtagcggaggacgtacgcatcgacgctatggccctcatacatgcgtgtatggaggaggcgagtgtgctgatggagcagcacttcgactggaagatcgccgtgcctgtgcccactgagacggtgtacggcacgagcatggcagaggaacatggcgagcctgccatgcgtgaattggtacacgtacaccggaagcacattcggtcacgttacctgaaagattacatcccatcatttgaacaggagaagaattgacatggcactcaacgcagcaatgaaggcacgcttggcgaaggcgaagcaggtcggcccgaacatgaacgaggcgcagcagggcggtggttcgtacaccccacccgctgagggcgttacccgcttgcgactcgtcgggtacttcgaggtcggcgaacacacggagcagtccggcaagttcatcggcaagaagaacaagaaggtgcagctggtgtgggagctgagcggcaagaaccacgagccgaccgaacacgatggcaagaagatcccggtgcgtatgacgcaggatctgaactactcgctcaacgagaaggcgtcgttctacaagctgttcgtggaactcaacgcatgccacggcaacgaggccaccatcttcgccgagctgctgggcaaggaattcctgggcaccgtggtgcacaccaccaagggcgagggcgcagccaagcgcacgtacgccaacctcaccaagatccgcaaggccgtgcgattggacgaggacgacaacgaggtgccgatcaaggttgacgagccgatcaccgagccgaagttcttcgtgtgggacatcgccacgatggaagactgggacgcgctgttcatcgacggcgagtacccggagcgtaaggatgcggcgggcaacgtgacgcacaaggcgcgcagcaagaacgtgttgcaggagaagatccgcagcgcgaacaacttcgactccctgcccatcgccgagttcattcgtgctggtgtcagcgccgaagacgaggcggacatggacgatgcgctgggcggcgacgacaatggcgaggacatcccggacgacgaggcgcagcaggagcagcgcgaagtcccggcaggtcaggccgacgttgacgatctggtctaagccatgactactgcggccgagcgtttgaaagaacacgcccgtaacgcaccgatgccgggcaccactgcccggccttcggtcgagggcatgccactccacattgacggcgactacgccgcctactactgcgcgggcaacgacgagacatcgccgggcgtagctcgcgagaacctgctgacccgcatcgagcgcgcgaagcaggtgtccggtgccacccgtgccatcgtgcacctgtcggacagagcgtgcgacaagggcctgcgcttcttcatcgcacagtccaagccgtaccagggtcagcgcaacacgggccgcaagccccagaactgggactacctgcgcgagtacatggagacgtacgacggtactgcgttcgaggtcaagaactggtgcgaccgcgaggccgacgacggcatggcctacgtgtccgaagcggcgtacaagatcgacaggcccggtgcagtcctcactgcggacaaggacatgcggatgttcgcaggtctgcacatcgtgtggaagaccttcgagatggtggaggttctgcccggaacgtacgacctgatgcacgacggcaagcagtacgggcacaagtggttctggactcagatgcttcaaggcgataccgccgacaacatcatgggcctgccgcgtgttggtgaggttgccgctgtcaaggtactgcacggtacgaagtccaacgccgatgctttcccgctggtgctggacatgtacaagtccaagatgggcaacgcatatgccgaccactttgtggagcaggctgcgctgctgtggatgcggaccgacaagcatgcgctgatcgggaacttcttcgatgcgctcgatgtcgagtggaccaaggatgtgtcccgtgccctggacagaatgaccgaacgtgtacacggagaacgcgatgctctctacgcctcggaggcttaaagcatccgaggttgcaactgtgcgtgcccgcattgccgctgagcagggcgggcgctgcaagttgtgccaagggaagctgggcttgaaagccccactcgatccggtgctggatcatgaccactcaaccggcgccctgcgtggcgtactgcacagggggtgcaactccctgttgggtaaggtcgagaacaacgcaggtcgctacggtgtgtactcactgttcgcgttctgccacggactcgcaccgtacctgcaagcgcacggtaccaacataactggtctggtccacccaaccttcaagacgcctgacgagaaacgtctcgctcgcaacgcgaaggcacggaaggctagggccgcaaccaagaaggaacccgcatgaaagtcacattgaaacaactgctcaagcgcgcaccgaagaccggaccgaagatcatctgcctcgacatcgagacattccccatcgagttctggggttggcagatgttcaacaacaacttcggcgttccgcagatcaagcgggactggtcgctgatgtcgttctccgctgaatggctggacgacgacggcaacttctacatcgaccagcgcaaagagaaggacgtgttcgatgaccgcaagcaggcacaggccctgtgggaaatcctcaacgctgccgacttcatcctcgcacgcaacggaaagaagttcgaccttcgcaagatcaaggcacgcatggtaatcctcggtttgccgccgctgtcgcctatcggtgtgatcgatccgatgctgctcaaccgcgtggagttcgcgttcacctcgcacaagctggagtacaccaccggcgtgctggtgcctgagctgcgcaagtacaaccacaagaacttccccggcttcgagctgtggatcgcatgcatgcaaagcctgcctggtgcgtgggatgagtgcgaggcatacaaccgcgttgacgtgtccggcatgaaggccgagtacctcaaggtgcgcggctggtactcgcagcatccgaacctcgccgtgtactacaagggcgacggcaccctgcaccgctgcaacaagtgcggccacgacgagatgatcccgcaggacaagcctgcgtacactcaggtcggcacctacctgctgctgcaatgcacgcagtgcggcggacatagccgcgcgcgtcgcctcaccaccaccatcgaacagcgcaagcacgtcaccgtgcccgcctaacaggagaactacatgagccgctttctcgaagcataccgcgttcaggtcgtaacacccaaggacgtggagaacggcgcaaccaagggaggcatcctgtggatgcacagtgaggtggaaggtagccccggctacttctacttcatcgactctccggactccgaccagggcattcccctggcggcagcacaggttgtgcgcgacgaagactgcaagcgctacgaccgctacctgatcgagaagcccgagaacgcgggtaccgaaacgctctcgacaccggcccccgaattggtacacgtcagcacgccggagcctacgcttacggagaacccgtacgccgacttcggtgccgaccatagcgtgaggccggtcacgctccacgcaccacctgcatctcgtggtggcggcttgaagttcgacgccggtaaggtccgcccgtcgctactcatcaacggcatgccgcgtgcgctgctgcgtgtcgccgacgtgctgacgttcggtgcgcagaagtacgaggcccactcgtggaagcaggtggagaatggcgaggagcgctacaacgacgcaaagctgcgccacatgttcgccgaggccctgggtgacaaccaagatcctgagtccatgatcgagcatctggcccacgaaatttgcaacggcctgttcctgctggaaaaattcctgatcgccaaggagaacgcacattgagtaactccaccaaagacgcagcccgcctgctcaagtacaccaaccagcgcgttgtgctgggagatgagatggatgacgcggtgacatacgccatctcccaggtcttcgtccgcgcttccgaggatgcgcaggcggacatctatgcagccgtccgcgagtgcttcgatgagtacccgaatggcaccagccgcaagatcgcagtggtggacaagctgcgtaagtaccagctgagcaggatctatggctaagcaatcgaaggctcgcagcgtcaaggaagcaggtgtcaacatcctgatcgggtactcgataaactactccgcgaatatagcgctgctccctgtgttgtgggacaaggaccacccgttcctgagcgcacatgctgtaggcatcaccttcacactgatcagcttcgtgcgtcagtacatcatccgtcgttggttcagcaaaggagactgacatggcaaagaccaagtacatcacccataccgcatgcgagttggagaaggtgccgaaggctgcgaagatcggcgaggccatcgccttctacctcgtgcagttgaagtacgacggaatctgcggcgtgctgatttacctcggcccggatcagtggtgcttccgcacacgcaccggcgaagcggtcaacaacttcaaccacatcggcgaggcgttcgcatctctgccgttcgatgtgttggccgaacaggttgcgagtacgttcgaggccgacgagggcgaagtgctccccgaccagatgaagcgcggcgtgtacatcggcgagttctggcacccggactttgcagcatccacggtcagcgggttcaataacctgacggacccggccaagatcgccgccgcccaatccgacatccgcaaggtgcaattcgttgtgtgcgacttcgttacccacggggagtacatggcaggccgcagcgacgtgggctttgctgaccgcatcggccgcatcgcttggatgcagggcatctaccatccggacgacggcggtgtgctgggcaagaacgtgcagccgcccgctcctcccatctggttcgccggtcacgagggctacttcaacgagcaggccgcgacggacgtgtacgccctagccgacgaggccgtggcttccggccgctacgacggcatcatcctgcgtaacgagaacggcccctggattcagggtgcgcgcgatgaacacgtggtcaaggtcaagcccttcatcacccgcgacctgctggtcgtggatgtggaagaaggcaagggcaagtacaagggcatgctcggcaacctgatcgtgtcgtacaagggcaaccgcatgggcctgtctggcatgtcggacgctgagcgccgcgagtggtgggcaaaccccgcgaccatcatcggccagatcgttgaggtcaaggccatgagcgagagcgtcaagggagtgctgcgcgagccgcgcttcaagggcatccgctacgacaccgaggtggactcatgagtgacgtgcacgtcgcaatccaccacgtgctcgaagaccagaccatccgagtgatgatcacaatcccgttccatgagtacgggcaatcgctgttccccaaccagtacctcaaagacaagatcaacgaggcggtggagcagattatggacgaagcacgcaaccggagataacatgcagacgcagctggaactggaagaagagatgtacgcctacggacgtgtccggatggcagacagcattgccgccaacgaagagaaggggcgcgcagaagcaaacccttacgctcagaagttgtaccgcaccttcctgttcccgctgcgcgacgtgcttgtctccgagctgtcggagaagaagccgggccgcaggcaggcgcatgcggctctgctggatgggatggacatggatgccgttgcgtaccttgcggtgcgcagcgcactgagcagcgcgatgcaggacattagcgtccgtgctgtggctatccaagtaggcaaagcagtgtaccacgagtacctgctgtgccagtttgaagacaagaatccgaagttgttccactacctactaaacgacatcgaccgccgcatgtcttcggacgagcggtacaagatgaacgtcatgcgcaaccaggccacgaaggcaggcgtcgagttcaaggagtggggcaacgcacacgtgcagcaggtcggctactacctcatcgacaagatggtgcaggtcggcatgttcgacgtgacgaacaacagagagggcgcgctgaaccacgtcgagcttaacctgacggcagcagccgaggccatcgtgtctcagatcaccgagttcgtaaccgagatggcaccgtactggacaccgtgcgttgagccgccgaaggactggacatcgatcgatgagggcggctaccacaccgagggcatgcgtcgccttgatccctacctcgtgcacacgcacggcactgctcgacgcttcttcgagatggcggacatgagcaaggagctgcgctgcgtcaatgcattgcagcgtacggcgtggcgcgtcaaccgcgacctgctcgacatcgcgaccaacgtgtcgtatcacttcgacatggaagagatcatgatgcaggcggacacgccgaagccgcagcgtccgacgtggctcaccgatcagaaggtcgatgagatggacgaggtgcagctcaagtcgttccgtgcatggaagcgcgagatggcatcgtggcataccgacaacaagctgcgcaagctcaagggctaccgcttctcgaacgtcatgaaggaggcgcgtaagttcgctgagtatcctgaaatattttttgtctacttcatggacttccgtggtcgcaagtacgtcaagtccaacggcattagcccgcagggttctgacttgcagaaggcgatgcttgagttcagcgtcggcaagcccctgctcacgcagggtgccaaggactggttcatgatcacgggagcgaaccgcttcggtgtggacaaggtagactataaggatcgaatcaaatgggtactggacaacgagcatctgattctggattgggcacgcaacccggtggactcgccggactggatgaacgccgacaagccgtttcaattccttgcgtggtgtttggagtattccaagtggcgggcattcggggacaagttcctaagccggatcagcgtaggaatggatggctcgtgcaacggcttgcaaaacttctccgccatgcttcgcgatcctatcggcggaaaggcagtgaacttactcccgtccttgctgccaaacgacatctatcagatggttgcggaccgtgctatgcagctgttgcaggtttccgaggacgactcgccattccgcactatgtggattgcgcacgtgttaacgcggagcctggtgaagcgatctgttatgaccctcccgtacggctcgaagcgtacttcgtgtaaggacttcatcatccaagactacctcaaggctgggaagttcaaggagctggacccgaaggactacgagaaggccgcagcttacctgagctataaggtgtgggaagcaatcggcgatgttgtcgtgaaggcgcgcgaggcaatggattggttgcagcagtccgcacgtgcgatcatcaaggcgggcgacgagaacatccgctggatcactccgactgggttcccggttgtgcaggtgtacttcggcacggtcgagcatcgcatcaacaccaagctcgcgggcaacatgaagatcaaggtgctgacggagagcgacgaggccaacctcaaccgccacaagaacggcatcgcgccgaacttcgtgcactccctggacgcatcacacctgacgggcaccacgctgcgctgtgtgggcgatggcatgaccgccttccacatggtgcacgacgactacggcacccacgcagcggacgccccagcgatgtacacggcgatccggcaggtgttcgtggacatgtaccagcagcacgacatgctccaagagctgcgtgacgcctacgtgatcctgtccgcaccgcccgagcagggcaccctggacctgacgcaagttcttgattcgccttactttttcgggtgaggctagtttcagtacacgtacaacagatagaccggctccccggctcgtgcttcggcatgggtcggggagctttcggccgtccgcattttggtacacgtacaacacaggagaaaccatgtctctcatttcagtacccgtcccggcagagaacctgtcggcggaagcgatcaagaagatcgaagccaagctgggtggtatggcgaacccgcagatcaatagtggcaccacgcaccttgaggctgggcagaagctgggcgtacagttggtgctgcgaatccttcgcgatggttggcacaatcagtaacttagcgtatctctgcatctgtctttaggtaccattagttagcttacataggagatagatacatgggattgagtagcctttggggcggaggtgatgcgaagcgagcagcaaagatgcaagccgacgctatcaaagcacagactgctgcgactgtacaacaggcaggtctggctgctgagcaagccgctaatcagatccgcaatacgatgcttaccgagactgctacgcagtatgcgaagactctcctcggtcggccaatggaacaggtcaacgtgcgtctcgctccgcaggagcagatttctacgactgaccgtacccaacgtcagcgttctgtccgcgacacttacatgtccggtggatcgtggttcacgtgaggagtaaccaatgaatcacttcgtcaatacggcaggcgcccgatgggctaagctggacggtgttcgtggtaacatcatccgtcgagccgaacgcttcgcaaagtggactatctccaaggtcttcccggatgatagctacaaccagaacaacgaggccctcagcaatgagtggcaatctcttggtgcgcaggcagtgaaccatctcagcaacaagctggtgatgaacctgtttgctccatctcgtcccttcttccgccttggtcctaagaaagccgccaaggaacaaatggctaccattgcagcggaacagaagcgggctatggagaacaagctgtcggtggtcgagcgcgaaagctccgacgtaatcgaccggctcgcactccgcgctaagctgtacgaactgctcaagctcctgatcatcaccggcaatgcgctgatggttctcaaggacaagagcatgcgcgtgctgactatgcgcaactatgtggtgcgccgcgatgtcaatggctcgatcatcgagatgctgattcgcgagaaggtgcacaagtcggagatggaccaggatgcgctgacgatggcgttgcgctccggtcagttctctcttgatagcgagggctgcgcccatcacttcagatggatcacgttcgatagcggtaagttccgcgaggaccagtggtacaacgacttcaagctaccggcggactactcctcaagctacaccaaggagcgtatgccataccatgctgtgacgtgggacctgacatccggtaaccactacggtactggcttggtcgaagactacaagaacgacttcgcttgcttgaccgcgctgtcgcaatcgactgtgttggctgcgatcatgaactccgagttccgctgggtcatccgcgcaggctcaatgacttcagctcaggacttggcgaacagtcgcaacggcgacgtgctgtacggtgagcagggtgacatcactccgctgccttccggcatggaagccaagatcgaagcgaacatcaacatcgcacagcagtacgtgcaacgtctcggcgctgcgtttctcttgcagtccgcgatcactcggcaggctgagcgcgtaactgcgcaagagcttcggatgaacgcggaggagttggagggtggcctgggtggcgcttactcccgactggctggtggcttgcaggttccgctcgcggacttctgcctggactacgccggttactccgtcaatgaaacgaacttcgaggctaccgtcatcaccggccttgcggccctgtctcgtgtgggcgaccgcgaccggctgatggagtacctgcaatcgctcgcagcggctgcgggacttccaccgatgatgctacagcgaatgaagatcagcgtcctgatgtccgaccttgcctctgctgtcggtctggatcgcgacacctacgtctacacggatgaggagttcgcacagatgcagcagcagcaggcccaacagcaacaacagcagatggccgtacaggccgctgtccaacaggagacacgagcatgaccgatgaagtaaagaccaccgttacccccgcagtgacggaagtgccgaccccaacacccacgcccacgccgacccccgcacccgagaagaccgaaacggtcgataagggtactccgtattcggcgaacaccggctcccgtcagctggatgttgcgttgggtttcttcgtcaaccacctgggccttagcccggagtcgccggaagttgtggaagcacagcgcaccggtaacttcgagtacctcaagggccatgcggcacagaagggcatcgcgtccgaactcctcgatccgtacattgcgctcgccgaaggtggccgcactgagctgaccaagggtgcggaggcgaagcaggcggaactcgcgaaggagctggacgagtatgccggtggtaccgagcagcgagtggcgaccttggctttcgtcaaggcaaactccaccgacgagcagttggcggagttcgatgaaatcctcaaccgtggtggtatcggtgcgcaggcgctgatgtacctgttcaagtccaagatgcaggccgatccgtcggtcagcgtgcagggcaaggacgcggttgtccccaatgcaggcgcgcaggttccggcgcaggcgactcagtacgcaagcaaagaagactggcgtgctgcgcagcgtgctttgatcagcaagtatggcatcactggctatcagaccactccggaaggcaaggcacttgcggccgcgttccccggttaatcgttccaccaacaactagaaaggagctttatacatgagcaacatttggggtcccaccaatccggttaaccagaaccaggccctcggcgctggtccgctggatgcgttgcagcaggagcagttcaccggcgaagtggaacatgcctacatggcaaccaccgtgttcgagccgcacttcaagcgcaagatggtcgtcaagggcaccaacaccctgaccaagaaggccatcggccgctccaccttgcagcgtctgggtcgcggtcaggcaccggacggcaagcaggtgaagttctcgaaggcgcaggtgaccgtcgataccatgctgctgtcgcgccacaccttcgatgagctggaaaccatccagaccgacatcgacgcacgtgccgaagtctcgacgcaggcaggccgcgacatcgcggacttctacgaccagaccatcgccatctcggcggtgaaggctgcgcgctacgcctcgaacccgtacggcctgggcgaagccgatggcttctacggtgccaccgtgcagaccatcgcagcgggcgacgagctggacccggccaagctgtaccacggcctgggccagatgctgatgaagatggaggagaagaacgtcaacccgcgcagcgagaaggtgctgttggctgttcgtccggcgcagtactacgcactgctggacgcggagcagatcatcaacggcgagtacatcacctcgtccggtacgaagatcgacaacgctccgatgttcaaggcatggggcatcccggtcatctcgaccaacaacctgccgaagggcgtggtcaccggtcacctgctgtccaacgaggacaacgacaacttctacgacggcgacttccgcaatgtcgtggctgtggctgtcggcccgaaggccctgatgatcggcgagtccaagccgctccagaccaagatctggtactcggatgagtccaaggtctgggtggtggatgcctggttctcgttcggcatcgcgccggatcgcgtcgagcatgcggctgtcttgcagaccgcgtaatccaactgggcgcagtccctgaatcctctgaggagtaagctcaaactgcgcccacctactaggaggccacatggcaaccatcgctgcaaagattcccttcgctcccggcacctacgtgcagctgtccgcagctgtcgatgtgtacccggacaagacgcaggcttacgtctgcttctaccagatcatcggcaccaccctgtacgtgcaggtgcgcgtgaacgatgattcccccgacctcggcacgttcgacctgttcattccggtgagcggcatcgaggccctgggcacgccgtaagcacacgccccgctctctaactgagggcggggcattattggtccaaggaggattcaatgtttatcagcaagctcgacgttgttaacgacgcgctgtcgtgcctcggcgaagcgggcctgactgacctacaggaagaccacgcttatcgcgatatgatcctcggcttcctgaaagctgagacggatcgcatctgcgcgcgcggctggtggttcaatcaggagtacacccgcctgctgcccgatgcgaactcgcgctacgtgtacgtccccgaggacgtgtactcggtggtgaccccggcgaccgggttccaagtaacgcagatgggtcgtcgtatgtacgactcgcgcaaccgcacctacgagtgggacaagccgatccctgttcgccttacgcgcatgttccctttcgaggacttgccgtacattgcgaccgaggcgatccgcgatgctaccaccgtgaagttccaaggccgcatcgactccgaccgcgagacgaaggccgacgccatgcgtactgcatcgctgtcaatggagcagctggtgcgccttgatgcacagaatcagaagcacaacatgctctaccggaatggtatggagcgcaatgcatggatcgcaacgaaccagcagtacccatcgggcgagcgagacatcctcggccctaacatcatcgttcactaggaggcatcatgagcaagaccgtaggcagcttgccatcgctggtgcagggcgtatcggagcaggaaccgcacaaccgtgcgccgggtcagatgtgggagagcgtcaacatgattgactccccgaccaagggcaaggctcgtcggcgcggcaccgtctactccgaccacatcgagctgccctcggccattgccgctgcactggttgaggcgcgctcgcagaccgagtacaccttcatcatcgacgggcgagaatacagcttgatctaccgcagccgcgcatcgacgctcggcaaggactacttcgcacagctgctggacaaggagtccgggaagttcttcgacatcgtatacgagggttcgacgtggatcgacaacctaatctccggcggcgtgtctgccattgcgtgcatcgggcggtatgtctacattgcgggcaacacgacattgccacgcgcaacgtctaccgaatcctggaactcgcccgacaatttgcagaagctcgcggcctgggttcgcgagggagcgtacagccggaagttcacgctggtgctgtaccacgtcaacgggaccaaggtcgagttcgcgtacacgacactggccgctgcgtaccctgagctgctggacacgacggacattccgttctacaagccgggtagcaatccgcagacggcggacccggagtaccagaagcgagtcaacgaccgagtgaatgcgtacgagggcgagaagaccgcctggattcgcaaggcggcagaggacattgtgcccgcgaacatcgcagccaagctcgcggagttggcggcgcaggcaggcatcatcgcttcctcgattggcccgtgcgttgtcgtggacgatccgaactacaacgacatccgcctgttggacgacgcgagcaacacgctggtctcctacgctgggcgcgaggtcagcgatccgcagttcgttacgctgtaccattgggcaggcaagatcgtgcgcgtgcgcccgtcaggtggcggcgacaaggagagctactacctcaaggccgtagcactcgaagagggcgctgttggctggaccaaggtggagtgggtagagactgccggtgtggtgcacgagattcacaacgtcgtgtcccagatggtaatcgatcctgcgttgaagactgcgtacatcgcacagaacggcgaaggcttgaagtccctggcaccgcagctgggagaccacccggtctacaagcagaacgtggtaggcgatgcggtcacggctccgctgccgcactacttcggtcgcgtgatcacctgcatgaccgtgttccaagaccggctcatgatcagcgcggacaacatcgtgaacttctcgcggtcgtcggactacctgaacttcttccgtgttaccatcttgaacatccaagacaacgaccccatcgagattttcgctcacgggtccgagggcgacacgatcaagcgggcggtgatgttcgagcgggacctcgtgctgttcggcgagctgcgtcagtatgcgatcaacggacgcgagttcctgtcaccgacaaacccgaacatcaacgtgatcgggaacttcgagggtggcgtgcgcgcacagcccatcgcctcggggaacttcctgttcttcggcaagcatgcgaacgagcggacgggcctgcaccagatgcagcctggcgagacggcacagacgaccatcgtgtacgacgtgtcccaggttctcgacacgtggctgacgggcgagcctgtgcagctgctgggcaccaccatgccgaacatgatcacgtaccgcacggatgcggacccgtcgatttggtacacgtaccggtacgcagacgagcaaggcactggccgcgttatggcaagttggggaaagcagcagtatgctcccgagcttggcaccgttgcggctatcacgcactaccgtggcgacctgttcgtaatcacgctacgctcggcaggaggcaaggactactggttcgccgacaagctgagtctcaacgtggacatgccgcgctatccacatctggactcccaggtacggtacggtcaggagacctcgtggcacgcggcagcagccagtaagctgtacgttgctgcggacaagtcctcggactacttcttgctgggcgctccgcgcgctggtgctgctgagtttgtggagcaggcgccgggtgtggagtccgcacttgtagttggctccgtcagtcctgcgtacttccagccgacgaacccgtacatgcgtgatagccagggcctgccgatcctcaacggtcggatcaccctgacctcgttcggcttccacctcgccgacaccggcgggctgcgggcgtacgtgttgaagccggatcgcgagcggaccttgctgttcgagggccgtgtgatcgggcacagcagcaacatcatcgggcgacagccggtcttctccggaatccgcaccgtaagcgtaggccgcgagacgcggacctgcatcattgaactgcggtcggaagactggcaaccgcttcgcgtcactggcgctgagtggtccggccaggtattcatgccgcgcgcacgagggctatactgatgagcggtagtatcggtactatgctgcaagcgaacaacatcacccgcgtggcacgtgcgaagtaccaatccgccgttgccacgcaggccgcgaacaacaagttgaagaaggcacaaggggacctggctaactggtcacgttccctgagcaatcgtcggcggattgaagcagcggagcaggagttcaacagcggcgctgagcagatcagcaacgagacacgtcaggctgggaagcagacgacgagcaacagcttgcaggcagcagagcagcggggcgcactactggcccgcgctgcgatgaccggtgtaggtggctccaccgtggaagcgatggagaacctcatcggcctacaggctgcgactactcaggaagagttggatcaggcagtagacaacatgcagtacagcggcaagcgtaatctcactaccgccatgatgaacagctacatgatgcaggacttctcgcagacgatgatggacttcgacttcactcagcacatcgagccgaaggcgatgaagggtcgtgtcgcgaagctcatcggtgtggctgtggctacctacttcggtggtccgatggcaggcgaggcagccgctgacttcgctgtcggagaatggcaggcggagaacggggacttccaaggtgcaaaccagtccttcggctcgtccatgaccaacgcgggcgcagcgtggaagcagtacagcgaccgcgatggtggctcgtggggcggagacgttatccgtggcatgcgtgcaactggcaccagcactgacgctgcccgcacgacgggcggtgtatcaacgaagaaggcgcagtccgcatccagcggcagcaagtcttggttcaaataacaggaggcaacaatggcaggtattcagtttaaccccgtcggtggtctgcaaggcggggccagtggtggaggtgctgcggtgcctacccttggcatctctggtggcggcggggcgagcagcaacacgccaatgcgcagcggcaaggattggttcgacaacggcatgcgtgcggacttcggcggtaacatgccggagttcctcaacgacgtgttcgctgcgccgctcgctgtggcaaagcaggagcgcgagtggcagggctacatggacgcagctgcgggtacaaccgcagaagagattcgcgagacaaagccgtggtacaccaagctgttcgggccgactcagtacgagtccggcgcgatcgcattcgagaatcagaagaaggcttcggatctgatccgcgactggaccctgcgtatgccggagctgcgcaagctgcccgccgagcaggtgtccacgcagctgcgcgagcagatgaacagcatgatgtcggactccccgttcgccaatgctgtcttgcagaagagtctactgactcagttcgcaccgctgctagagcagcatggtaaggagcgaatcgcttggcaacaggcggggctgctcaagatgcagacggagaacttccagtccaactcgtccacgtaccagttgctgatgtcgaaggctgcgtcgctcggtactgactcccctatggacatcaacaccgccaagcagttggaggcgtccaagtcagcgctgttcgatgcgctgaccaccggccggttgcagaacgacgatagcgtcaagtccttcatcatgacgggcctgcgctccgcaatgcgcaacggcgagttctacacggtcgaggcaatgatggatgagggcgtgctgtcctcgctgccaatcgaaactgctgagcagatcgagaaggcatacatcacggccaagtcgcagtacaagaatcgcttcactgcggacaacccggacttcgagaagatgatggcgaaggccaccgcgtcccgtcacctgggcatcggcggcgagcctatgcttgcgcagctgcgggaaatcaacagcacgtactccgcgctgactggtgactccagcgggttctacgactccgggcagatggctgcgtacgccggtgatgcaacgtcgtcgtggctgcgtcggttcgagcggcaggaggataagcgggaacggcagcaggacaagcaggatcgactcaacgagaaggcagcagacgaggcggcgaaggctgaggtcgaggctcgcaacacggcgcagctgcaagagttcttcgtcagcggctcccttggcgaggccatcaacatgaagaacgtggagaagggcgatgcagatcgtgcctctaccgcgcgcttctctctgctgatgggcgagaacaaggtggagcaggcgatgggcaatctcgtgtacaacttcaacaacacgaagggaacgtacaagaacgatcagctgtcggctcagttgcaggcaaacttgcagaacagcatggacgagcaggtgagtgatgcgttcctcgcacagcacgcgcagtggaaagcgctgtacagctcaccaggatacgccatgcagaatggtgaggtgcagctaacggacgcggcgcagggccaggccactgccataggctactacggcgagactctcaatcgcaagatgaaggagttcgacgaaaagtacagcaccggcagcatgactgctgaccgcgcttacgctacgaccttcgggccgtgggtggcagcgggtcgcccggacttccgtggtatcgaacgcagcgagcagaaggaagcgaccagggcattcctcggagcaatccgtggtcagtccgcaggtatgttctcccgcatgttcggcaacgggttcgctttgcatccgtccgcccaggcacagttggcacaggcggtcggtccgtactacgagcagctcgatgccggtctgttgccggagcagcgcgccaaggctgcgatgaatctggcgaaagcgggcggtcgtatcgagattgtggcagggcagttcctacattggaatcggaatcagcagccgctgaccaagtacctcaatgatcccgacggcgagcgtacctcggtgctgttcgacgccgttctcaacgaacggttgaagtccgtgggcacgaagactgagggcaactccgtcgtcatcaatcgcctggcggacgagaagggcgatcccgtgtacgctgtgcacgtggagacggacgacgggttctacaacgtggacatccgaggctctgacctgagcaactacgatgaggccaaggcccgtgcactgcgcgccaagatggaggcaccgaagaagccactgaacatcggcttccagctgcccgcagagaccgacaagcagttcgagcagtaccacggtatgagccgtgagcagtttgacgcacgcggaaagcgtaaccgtcagcgtatcggcgcggccctcacgggtggcgcagcaggtttgaccactgacgcactgaacaaaaactaacaggagaacttatgaacactctcgaccttgcaggtctaacgctggaccagaagtttgaagcagcgggcaagttcgcgggtgttccctcgcagctgttcgcaggtatgtggtcggtggaatcggccaagggcaccaacatgacctcgcgcgcaggtgcgcggggtcacttccagaccatgcccgatacacagaacacgtgggaagaacgcactggcaagaagttcgacccggacaatttcgatgacagcttgagcatggccgcgatgacgatgcgcgagaacatgggcaagttcaagaccatcccggatgcgctgcgtgcgtacaacgcgggctgggatcgctccaagtggggcaacgaggagacgagtgcgtacgtggggaagattgccaccgagggcggtatggccctggccggtgcaatgaccatgacgtacaacaaggtcaacccgaacggcagtatggacaccgcattcaatggcggcgagttcgatgaggcgctgttcgagaaggcttgggccggtgaggcgctgggcgacatgtccgtcctcaaggcttcggcaatcaagaagcatttgacggacgtggagaagggcaccgcgaacctcgcagctgtgcagacggcagcgatcaacgtgggcgacgccaatgtggtgcagatggcgcacgaagcgcaggccaccgtggagaaagacgctgcgcagaacgtggcagcgtacaccgccaccaccggcaagcacaccacggacaccagcacgtccacgatcagcgccaaggaagtgcgtgcgcgtatggatgcggcgcttgagcgcgagcagtacgcacaatcgctgactgtcaacgacaagtggggcgctagcttcggcacaagcctgatggcaggcatgatgcgctacttcgacaacgatgtgggcgactcgtacccgaagggctggtcttacatggacagcgcgtatgagcaagagaaggggtactcgatgaaggagcgtgagttcctgcgcgaggccgttaacccgcaggatttcgagcgtatcaagggtgagatcgaacagcagcgctacgacgccaagctgcttgggcacctgtcggagtcctcgcggtttggctggtccatcgctgccgggttctcggaccctgtgggctgggctgcgggcctaggcgttggtaaggccgcgcagatggcgaaggtcggtgctgcaacgtatgctgctgcgggtcgtccgctgtctgcaatcgctgctggtgcagctgagggcgctgtcggtaacctgatcacgggcgcagcgctcgatgcaatgggcgactaccgcacgatgggggactatatcagtgacgcaggcttcggcttggcgttcggcggtgtgctgtctgcaccgggagccgtgcgcgaggcgcgtatcgcaggcttgcagaagagcatgcacgcacaggcggctatcttggacgcagaactcgctgtgcgtgcgcagcaagctgctggtcccggcgcaactccggaccaactggcgcgtgcgatgcagacaatcgaggaacaggacgacaatgcctggcgtcaggccacgttgggcaacatccccgacgctgaccgcctgatggcgcgcgctgacgtgggcgatacgcccgatcctgctgtgagctacagccgattcagtgatgatggctcccgcaatgcgtacatccagcagcaggcgttcgatcagagcatcgcgggtgacgatatgcgggctatggttgcggagttcagcaagcgaagcgacgatgtggtggcacgctacccgatcgatgaggccaagctcaagacgttcctgtcctacgctgacttcgaggcaacctccaccatcctgctcaacagcaagtccaaccccgcaaaggcgctgggcatcctgattgctgagtctccggagggtgcagcgggtcgtcattcgaccgcatcggtgtcccgcacggcgcacttcgagcagtacatgggcaacatcaaccgtaatacggaccagctgttcgacatgtgggcacgtgagcaaggctatggcacgatccgccagacgatggacagcgacattcgcgtgcgcttcaacaaggaagtgcagttggagatgaatcgccgctggaacaagcagccggagggtgcaatccacccggcagtcaagcgtgcagcggacatctacgaccagggctacaagatcatgggtaaggatcagcgtcacgtcggagttatcggcgcggatgctatcgatctgaacaccaacggctacttccagcgttcgtggaacctgggaatgctgcgcggcatgggtgcatcacagcgcgcggcgttcgtcaacgctttggaagaccagttccgcaccgtcgcgggcttcaccgacagcaaggacttcaacgttcgcgccttggcggtgacctacctcgcacgccttgagcatcgcgcggtcggcatgctcgatgttccggccaatctctactccaacgacgccggtgcaatcgttcgcgatgccctgcactcgctggggctgagcaaggatgaggtcgaggcgcagatgaagcgcttcactcgtggtggcgcggggcataccaagtcacggatcgacatggactacggcaagaagtacgacgatggtgcgggcaacagcttcacgctcgtggacttcctcgacaatgacatgaacgggctgtatcgtcggtacgcgcagcgcactgccggtgatgttgcactagccaagtacggcatcatgggcgagaacgggatcaaggttgcacgtgagtccatgctgcgcacgggcgctacgcagaaagagctgaatgccttcgaccagctgatggcagagatgaccggtaagcaggtcggcaacggtgacccgctgatcgcacagaacgctcgctccctgacgaacctgtcccggatgggcggcgctgtgttcccgcagatgggcgcgtatcttgacgccgttgtgggtctgggtgcgactcgcgctctgcgtgcagcaggtgcaacgaaccagatgcgcaaggaagtgcaggccctggtgcgtggcgagaaggtgtccaacccgatcctgtccggccttgaaggcattggtccggagttcggcactgcggactaccgcatcttcggcatcttcgacacaccggagatggcggacatcgctggtaaggagagcgtgggcgtagtcaccaaggctattcgtggtggcgcgaacctgcaacgtgttctctccgggcaccgctgggtcactgctgcgcagacgcgcggcttcgctgaccagattgtgcgtaaggctctgcgcttcatcaaggaaggtggcgaggatgtggccctaaaggacatgggcatccaaggtgagatggtttctaccttgcaggctcgcttgaagaagatcgccaagttcgatgacaagggcgagttgatgtcgtttgatccgcgcaagctggacgtagacgacatcgcgggtcggcgcgcagtgattgagttccgggactccatcatgcgtggcacgaaccagatcatcaacaaggagttcccaggtgaagtgggcaagtgggcgcataacgggtggctcaagctgctgtttcagttccgtacgttctcgatggttgcgcagcagaagtcgttcaaccgcatcctgcacacgcagggcgctgcaaagctcaccggtctgctgctgggtggtatggcagtcgccgcaccgatccacatggcgcgtgctgcactgcgtgcttcgctgatgaaggaggaggaccgcgacgagttcctggaaaagcagctgcacccgatggccctgggccgtgccacgatgaactacctcgctgcgatgggcctgtgggccgacgtggtggaggcaggctcgggcctgggcaccggctgggccgatgcgttcggattcgatatgccggagggtatgcgccccacgggcggtcggaccatgaaggacacggacctgatcggcgggcagttggccccctcgctgggcgtcatcaacgacatcgggcagggcgtgatgggcaagccggacaagctgtggaagtccgcacccttcgcctccctgccgtacatccagcccgttctcatgggcatcgacagcgccctggacgagggcgaataaccgagcaaagcagggccacggacggccctagttttggtacacgtacaacaggaggaaacatggcgaccatcaccgatcccaccttccgcttcgccaccaacgttttcgacgcggacggcacggacaaggtgtacgacattagcttcgcgcttggctacatcgacggtgaatccgttgttgctatgtcaggcgtcgaagatccaaccacgaagctgctgggcgacatgaaggcccacgttgtcagcttcacagataccccgcccggcaatcgcatcaaggtcagccctgtgcctgccgctgggcgtaagctcatggtgttccggcagactgacatcagcaagctgctggtgcggttccaagatggcaagctccagacggggcgcaatcttgacctgaactccacgcagctgatcatggcaatccaggaaatcctggacggcctacgcaacaacaaccagatcgtggaacagcagatcggcactatcgttgacctcaaccggatcatcaccgacatttaccgtcaggtgctggaactcttggcgtccggcggtatcgtgtcagttacgcccaaggtctgggcgggcgtgtggtctgcggccgaggacaccctcggagacacggacttcgatattgtgggggcggacgtttcagactccggcttctacgacacgtacatcgagggcgtcggccttgagcctggcacggacttctccgttgcgctggatggcgtgcccaagatccgctttgctcgtggcgactggcccgaaggcacgcgatggttcaccatcctgcgtgggtatgcgaagccgtacaccggcccgcagcccgtcaccacccttgcgtacccgatcatccggagtcaggcatctgcctacttcttggacgttaaggacgcattctcggtggtgttactcaacaaccaatccgcagtgactgccaccctcaagctcatccccgaggctcccggcaataagatcacgacgggcaccttcatcaccctggtacagcgcggcggcgtagtgtcgcttgcgtctgatccgggcgtcaacctgatcctccctggcggcaccgtggcgcgcacccgcgcactcaacagtgctatctcactcacctgcttggacgctgacgcgaacgagtggctagtatccggggaccttgctaagcaggagtagtcaatgcactttcgtctattcgatcgaccgctgatctttgatggtccgctgtcgtcaatgtacatcgacgggcagtacgcggactacgaaccaggcagcgcatacgagggccgtgtacaaatccacggctccgtaggttacaccaaggttgagattcttgagagcaacatcccgccgggcgcgtacgtctacgtggacaacgtgttcaagcaggtagtcgtcaagtggccgcagtacacgctgccggtcgataccttcaccctgcttgagaacggcgacttctcccaaggagacaacggggcgtggagcaacaccggccccaacaacccgttctccatcaaagccgacgacaagggtaaccagtcccttgagttcaagtctggctttaagggcgggcattactctgagggtccgttcgccccgatcaaggacatcaaccgtcagatcactgcaaccggccgcatcgcgcagggcaaaagctcgaagcgcaacctgtggggaggcatcgttctagtcttccacgacaaggaccgaaaccaactcaactacttggaaagcaactgggtaaactccggtggcgactacaaggacgttacggtcacggctgcggccagtgatgtgcgggccaagtttgtgagcgtgcgtgtgcagttcgaccggcgcgggcagaaccatccaggctgggcggacgacatcaagtggaaccactcgtggaccaagggctacaactctgacgagcagctcatggtgcgcgttcgtgtaacagacgcgctgggcaacacggccgagcacacgggctacatcgaagagaagagcaactggtacttcggaaagctcaacggcctgtacgtttacgacggtctggacatctccggaacacctatctcgtggcgaccatttggcgctccaatcatgcctcccgagaacttcggaattggcgcgtcggttgtggcattcgccactcgcgcgttcgtttcaaagagcagctatgcactcgatcaggtcggcattgcagcgggcgttcggtcgttcaagttgaacaatgttgcccgtcgcgctgaggcgcttcccgaaagcgtgtccatcgcaagccgtgtgcgctcgttctctagtaagacgcacgttgcatatgatcgtgcacgtcctgaactcatcaacatcaccgcagcggtgaaaggattcgttacccgatgaagattaagctaggcgccaaggggcgctttaaggtgcaggtcctgcgcgccgatgggtccgtccgactggacaggccctggcaggacaacctgatcacgaactacggcatggagtacatgaccggaaagtatcgcgacactatgggcggaagcaacctcatggactactgccgcgtaggtacaggcaccactccaccggccaacggtgacgtggccctggtgtctcaggtagggtacatgcctgccaacggagcatacagcagcatcgctccggtctccacttcgtctactccgtacgcaggttaccgggcagtgtacacgttcagccgtggtgctgttgttggcaacctgaccgagcttggcctgtcgttcctgacgaccggcagcaacctgtgcacccgtgcattgttcctcgataccaacggtcagccggtcaccattgtggttgccgcagatgagcagctcatcatcacctacgagatgcggctgtacatccctactgctgcgaccagctctacggttaccgatcccacaaccaatgtgcagtacacgattcgagcactcccggtcaacgctgttaactgggtgtggatcaactacctgctgggcggtcagctcggtgcgagtaatgggtctacgttgaccaacatccctacgtacgcctactacggcagcgacgctgcaatccggcagtggaacaacacgccgctaggaactgaggcgacaggcggtgccgactaccagaacgtccctgtgacggatggtacgtactcgcgtgattccgtcattaccattcgactcgaaacctttaacaatatcgatgtcagggtgctgcgcttctcggaggcttcaccgtcgtactttgcgccagtaaactggcaattggagttcaccccaacttggcgcaagacgaacgaccagaccatctcgattaccatgcgtctggagattgcgcgccgatgatcccagaactgaccctagctaaggcgcgagccgggtgggcgcaggcgatgggcagtcggtcaaagcccctgatcaactacgcggtcgggggtccgacgcttggggacggtgcagaaatcgcaggcactacatgggtcgtggagtacgtggacccagaagtccgcgtctacaagcaagagtcgccggaggaatactccgtggctcttagcctgcccggcattaccttcgtcagcctggcctttgaccagagcatgcgatgggctgtcggcttcactcatgaggacaagggcaagctgctgtggtacgactcccttgcagcaggttacgccgtactcgaagtcgcgggggctgtgaagcccttcgtggctctggacgttcgggaccttgtgtacgtcggcgtaagcgacatcatcgtttcatacatgcgcggcaccagcatctacacccgagtgcagcgggagcggtttcagactgagcgcttgctcaaggctgatgccggaagctccctgtctcgcttcggcctatccgtggtaaatcgcctgcaatggcaggtcatgccctaaaggagcaagaatgaaacttcccgtcagcgtggaactcgcagctgcaaccccgttgacgggtctgtctctgtttgcatcgtggatgactgcgtactcttcggtcatcatcacgaccctcgccatcgtagccttcgctgcgcagatggtgtggcgctacatcgaacaccgcgcgatcatgcgcaagaactcaggaggaaccaatggctaagaatgccgcagcagaaggtgccctcggcaccctacacaacacactcgccacagtgttgaccgccgcaatcacggcggagggcggtgcacccgcagcgatcctcgcggtcgcggcgaagttcttgaaggacaacgacatcacttgcgctgccgacaaggacaacgcgatgggtgagctgaccgaagcaatggaagcggcgcgtgcgccggtgagcgaaagggacaagcaccaggcgcttgagggcgtgctggacttggcgcagtatcgcgccggtaatcggtgagtaccgacaactcttggcgcgctgagcagctcgcccacttgcagagggagtacgtctccttcgcggtgttccttcgcgacatcatgtggttcctcggcggctggactccgacgtggatgcagtacgacatggcgaattacttgcagcacgggccgtcggacctcatggtccaggcgcagcgcggcgaggccaagtccacgatcacggcaatcttcgccgtgtggtgcatcatgatgaatcccaagttccgtgtgctgatcgtatcggcaggcggcaagcaggcaaacgagattgcaaacctcgtgacgaagatcatcctgttttgggagccgttgaagtgcattcggcctgacaagtccgcaggcgaccgcacgtccgtcgaggcgttcgacgtgcacttctcgctcaagggcgtggacaagtccccgtccgtggcgtgcatcggcatcaccggcaacctgccgggtaagcgagcggatcttctgatcgcagacgacatcgagtccccgaagaactccatgactgcgggcaaccgcgagatgctgctgaccctgagccttgagttctcggcaatcgcatctggtcagcccggcattccgccgcgcatcgtgtacctcggtacgccgcagacgagcgagtccatctacaacaccctaccgggtcgtgggttcgacgttcgcatctggcctgggcgcttcccaacgcagaaggagatggacaactacggcccgcacctcgcaccgcagatccgcaatgccatcgaggcagagccgagcttgcagtacggcggcggcatggccggtgacatgggcaagcccaccgatccgaccatgttcgatgaggagacgttgcagaagaagtaccaggatcgtggggcatcgagcttccagctcaactacatgcttaacacgaagctcatggactcccttcgcttcccgttgaagaccgaagaccttatcgtaatgcctggtgcacccactgggaaggtaccgcagatcgtgcaccgtggtattggtgtcgcgaatcagaaagtctaccagtcctctggcctggctttcacttgctctcagcccatgatcgcatctgacgtaaagatgatcgactatgagggagtgcacatgcaggttgaccctgcgggtggcggcgctaatggcgacgagacgggctttgcagtgacggcgtacgccaacagcaccatctacgtcctcgccatcggtggcatccctggtggttacggggacgagcagatgacgatgcttgccaagatcgcggagacgttcggcgcaggcactatcagcattgagaagaactacggctacggcgcattcgccaaggtctggctccctatcctgcacaagacgtggaagggtacgatccttgagccttacgtgggcggtatgaaggagaagcgcatcatcggaaccatcgagcctatcatgggccgtggctctctggtcttcttcgagtccgcgatcaacatggaccacgacctcacggagttctacagcaacagcggcaaccgcaagatgtactcagtgttccaccagctcacgaagatgcaggccctcaagggctgcgttaagcacgatgaccgggcggacgcactggaaggtagcatacgtttctggatggatcggctcaaggtcgatcagcacaagcgcaaagttcaagaagaggctcgcgagtaccagaagtggcttgatgatcctgtcggatggagccgcaaccagaagcccatgcgtgtagtactgaacgtgggcaacaaatatttcacataaggaggaagctatgcagcgtcatgaattctcgaattggatgtccacctggggtggcggcaatcaactggttaccgagttcgttcggctgaccgactacgtaaaggtgcacccgaagcacgcaacgcagatccttgcgctgttcgaggccgacgttgccaaggtccgcgctgacttgatcgcatcgggcgccgtgccgcctgtcaccccggagggctaatgaacaagctgccttacatctccaaagcgtccgaactcggcatcgctcttactttggccgctacaccggaggaagctcgcaccctcttgggtgtgggtagcggaggtggaggcggcgctgtggattctgtcaacggacagaccggcgacgttacactcgacgcagccgatgtcggcgctgcccctgcgggcgctccgctgtcctcgttcgcaaacgacgtgggcttcatcaccgacgcagacatccctggatcacccgtgctgagcgtgaacagcaagacgggtacagtcaccctgacggcggacgacgtgggcgctgtatccacaaatgctgtcggctcctcagttgccccgcttgttggtggcctcctgccaaactcgtacctgccgccgcttgccatcacgagtaccttcgtggtgtcctcgcaggcagcgcagctcgcattggctgtgcaggagggcgacgtgtgcattcgcacggacctgggcaagagctacatccgcctgaactcgtccctcggtacgatggccgactggcaggagctgctgactccgactgcgcccgtgcagtccgtcaatggtaagaccggcgtggtgtctcttacagcagaagatcttggagttattagctttgttcctccaggctacatcgagggtctgatgcttggatacatctcgggtacagggcttagcgtctcttccggagcggcttacatccccagtctttctcgggtagtggcgagtccttcatttagcaaaactgggctcacactcacggcgaactcttggtaccatgtttacctgtacccgaatgggcaaaccactgatattgaggtagtgaccgtaccgccctcttctccgtatagcggaacagcgcggaccaagggaagtgacacatcacgcaggtacattggtagcgttaagaccaatagttcgggcgcgtttgttcctttccaaatcggcagcagtggtaagtttgaataccgcatcactacaaatgttgagccatgtcgtatccttgttaacggtcttgctacatctcgaacaactgcttttgctagcagtgctatgcctatcactgctacgagctgtacgctcacgctcaccaacacatctagcggagggtatgcccttatgtccgtacccggaattgccgaaggtaacctctttggcgttgcgggaggtgtgagtcagattgtcgaatacactacgtcaccaaaccagggtatagactactacatgtccagtcagtcctcaaatggtctgtacatagacgtactaggattttttgcttcccgataggaggaacaatgaagagtagaatcatcgctgtagtgggtgcatccttgctgagcgtggcgggtttgttccacatccagtccagtgagggcgtgcgctacacggcgtaccctgatccggctactggtggggcaccctggaccatctgttggggccacaccggccccgaagtccacaagggtctgaccgtaagcaagaagcagtgcgagctgtggctcaacgtggacctgcgcgagcatgagggctacgtccgcaacctcgtgaaagtgcctgtcaagcagggtgagtacgatgcgctggtgtctttctcgtacaacgtgggtccgacgaaccttgcgaacagcactttgctgcgtaagctcaacgccggggaccgcatcggtagctgcaaggagtactccaagtggatctatgccgataagcgggtcttccagggcctcgttacccgtcgatacaacgagcaggccatgtgcctcaagctgggagactacatctatgatccgcgtattcgctgattacatcattggtggccttttgatcgtcgtgttagttgtaggtgggtactccatctacctctcgcagcggttggagaacgagaaagaggtcgcccaggactccaaggctgaggctgcggggtataaagtctacgccactgagcataagaaggtggccgaacagaaggaaaagactcatgttgaagttgaagaagcgttgcaacgacacgtggagtgggctgatgttcctgttcctgatgagcttgctgacaagctgcgggatcggaatccctaaggagttcctcaagccttgccacaagaccatgttggccgacgggcctgcgaagaaccgcgatgtgttcaacgtggctgtggatagggggttcgacatcgacgcatgtaacgcggacaaggctgcattgcgagcttacatcgaatcccaccctggtctccggactaaaaattgatagtttcgtgcgcgggggtacctcagatcgcaggctcccgcgcgcccccgtacgcccacccggtacacaccgcacgcatcacacgcgggcgcgagacgatgcacgcgcgcgtcgcgagggacagccttgacgtacccacatcgatgtgctaccatcgcctcacacgcgcacacacgggcgcacacggcatgcgcgattcctctcccgacgttggctgactggcattgctgaatcgattcacaattctcccgtcgaaagtgcttgacatggccgacggcatgccctaatctacacccatcgcagcaacggcagcacaccgcccagcagcgatacgatccaaaccgcatacctaggcttgcagcgtgcctacgatggatgcgggagtgcagcggggtacctacatagggccgtggcacaggatcgcagcagtgagccacacacagacgcacaggcgggacatctgtttcatttgctccctggtcaccatacggaatcacgaacatgcgtacgtacacagtcagcatcatctgcggtgcgttcggtcaggagaccggcgaggttcgtagcttccacgctgaggcccgtgatagggaagaggcacaagaggtggtgatcggctggatcgagcaggctagtatgtggcacgctgaggtgcagagcatcactcgcaccagctgagcatacggtaagactcacgaccgtatggtagagttgaattggtacacgtacaacagatagaaacggatcgtcttcacaagattcgtatctgtctttagaaccttcacggttagctccacaaagtatcgcggtcagcattgacagttgcctagcggcacagtatgatagccgacaacgagacctcttaccgagtggtaagatagacatgacaggcagcacggacagtaagctaagacagttacttgacagatgcactgagatgagctaacctagcaacacagtaagtaacgcagcgatcctcgcagtgagacttacaagagacttgacaacgacctgcgggtcaggcacaatggatgccagatgtagagagtacggtctgactcatcggaacagtcgtgattgtatggcttagggctgaggctcgacggtcaacagacgattgaactaacgacagatcacaacgcggatgacgtaattgaatgcggcttagtaaaccgcagggaccactcgcaagagtgccgcgtaagctacgacagtagcactcatcacctacggtggaagcccgtcacgatgagtaagtcagtgtagtgctgacaggtgcgtcaaagaggatagcaagggtgggtcataccatctgcgcaacaagggacccgataggttctttcccaccgatggcttagtgcctacggttatagattcacccgaatgtataggtgcctagtgcatctatatttttgggttgaatcacaagggcattagtcatagtgtccttgcctttcaacctatgaggctaacgccatgacattcaagcagcttatcaaggggttccgcaagagccgtgttgtgctggacctgcgcaccactgcgcaagagcagcgagtcgctgacatcaagcgtaaggcgcagcgctacgagaccctcaagcacaccgcaggtaagccgagcgtgtatgctgaggaggccgcacgcttgaaccgcctgcgtgctgagttccgggctgacgcgagggctttcgcatgaagcgccgcactgataatgcactggcgctcgtgctgctggtggtcgtggtgttcctgttgtggcagacgttcaagccgcagcctgcgcccatcgatgcacccaagggcgaggtgatcggagcgctgccaagcggtgcgctcatcatgttcatcgacaacgagaatggtgtggtgtgctacagctacctcgccgctatctcctgcgtgaggctgcgctaatgcggtaccgtatccactacgaggtaggcagagcgccgcactccacggtgtgcgatgggcttgagttggaaccgctaaaggaacagctcatgggctacgggtactacatcgtgcacgtcgaggccatacccaagccacgcatctacctgagtaagaatctcgggtggattgtccggcacaatcccggcctttggcggcaagaccgacgttggttggacgacctgtgcgaacatctcgacgcactgaatggggtggtactgtgatcaccctcgctgcaccacaactggcggtgcttctctgcatcgctgcactctcaggctgtgcattcggcatcggcctgttcctcatcgtacacaccgaccactacaagtgagacctatcatgaccgcacatatcgaacgcaagatcaaggccatctcccgcctcggcaagaagatggacgccttcattcaggacactgccttgcaggtggtgctgcactgccacacccacggggaaatttccctgctgcacaagttgtggtccgcaatgcaggacttcaagggtgcacgccacaaggcgatggacgagtggatgaagcgcaatgcgccggtcaccctggtcgatcccgacaacatccccgacgacaagttcccgttcacgctggacaaagatcgcctgctcgatgaggccgggcgcaatgcgctgtgtctggcgcagggtacaccggccaaccactggtacaacatgaagcccgacccgaagctggtcgatgagctggacatcaacgccatgttgaatgccctgctcaagcgggtggacagcgagagcaagaagaacgcagacctcaagatcaagggcgaagacatgctgcgcaagctgcgtggcctggtcagtgctgattgatctactgattggaggtgcgagtgtcgccgtgatgctcgcacttatcctacacctcaaccacatcgaacaaatcgaggcactccatgagcgttctgcatcactacaacagggagacacttgagaccgcactgattgtagcgtggttggtgcgcgacaacatcaagttagccatcgcgcagcgagactacggtacactgaggtacggcatctgttccgagtgggacgacgtggccgatgggcacaacgaggagtgcatgctcggccgcatccgagatgggctgtactccgaatggccgcagttcagtggaagctcatggtatcctatcccgatgccagagctggacgaggacgactaccagacctaccttgcgtcggtcgatgagtacgacgacccgatgtctcggcctcactggatgtacgagcaggtcggcaacatgtgggacggtgagtacggcgcgctgcgcatggactgcctggactggatgatctacacgcttgagcaagccgtactgtaacagcccgtgcccttcgagagaggggccacggttatgcacactgtactgcccgagtgtaggcgaatcctcactcacgtacagacaagggagttactgaaccctcagtgtgcataaccgtgcgactggcacgataaccgaatgacaatgacatggcacaggtaactgtgaagttcaagcgcaaccgcgagacgcgcaccaatggattgcaggcgtggcgtgtggaccgcacgttctacatcactccggctgcgccgtacctcatggcgcaggctgactatcgcgaagcctttcaattctacgggatgcgctaaccatgaaacactacgactatgcacacgagggattcaatggcaaccgtgagaaactatctggtccaatcagccgccgtagaaatactcggtcggatggcgcagctctgcgacccgagcgtcatgctgcgcgaaaggcaggtcaagaacaccggcgggccaagcggtccgatccatcgtgaggtacggctgcgcaaggtagtcgagcggctggacctgcgcaccggtgagcaagtgaagtacatccacgatccagacatggacgtgggaagctgggaggttgcattcaatgtgcatgcaatcaaggatgctacgccattcaccgatgagggagtggccgcgctcaactgctacggcatgaacaaaaccatgctctatacattaaccgaagaggagtacgacgatgggcaagcagcgtaagggttacgtggttctgtacagcaccaatgatttggcgcaccacctcaccgtgtcccgtgaggactacaccgacggcaccaagttgccggacggactgatgaagttcgttgaccgcatccaaggtgacgacctgctcgccctgctgcccgagccgcaccgtgccgagcgcgaggaaggtatcagcaacttcaactcatacgcactgatcacccgccgagctgcggcgcgtgccatcgtgcggcgcatgaacaacctgcgcatccacggacgtgatgacttcaagctgctggaagtgggcgagttcaaccgcacggtcaagccggtcaagcactggaacatcgagcgccgttactgccttgtcggtggcaagtggagcgactgggaagtgtggagcaagggtgtctcgctgcgtgccgacgctcgcaagcaggcggcgaaggacgagcagtactggaacgaccactcttccaagggcggatacaacctgagctacaagttccgcgccgtgccggtgtacgcatgagcatcctgtcccgcatgaaaggtatgtgggctgggcttgtgtccatgctgagcgacaccgaggaagtcgcgccgaccaagccacgcattgcactacacgaacggacacatcccgacgtgcgtgctgcgttcgaggcggacccgaactacgaggtggtggacgacaagccggtgcctcggtctgtgttgagcagcctgttcgggtacgtgccaagcgcaaagccctatatcaggctgcgaggccacggctacgtgcagggcgagacgttcgacgtgggcatcaaccgtgccaagcgtgcgatcaaggccatcaaggacaagcgcgagcggcgtgctgctcgaacccgattcatccagcggctgcgcagcagcggcatcaagagctaaggagtaaacatggcacgtgacatctcgaacttcatccgcatcgccatcccgtacgccgtctggtctgaggtcctgcggcaggcagcggccgaggttaccaaggcagcgggcggcgctaccaactggcgtgcgaccggctcgtggtacgacgacagcggccagtgccacgatgagaacgtcatcatcttccagtggaacttcgcatcgcaggactacccgcaggtggactacgctgcgcgtcagctggtcgatcgcatcttcgaggcgggcgagaaggccgtcatgaaggaacgccactacgacctgagtgtggcggagcagggccgcaccgtggcagggtacgccactcgcattctgttcgcaccgaccaagcactgagctagacctagcctaggtataaggccccgaccagctgggcgggttatcccggctacccatctctcactacacaaggaaccacaacacatgtcgaacaacatccgcaccgccgctgacatctccgcccagatcgacagcatcaacgccgatgccgagctgtcgcagaccccggccgacggtggcttgctgagtgtcctcggtctggaagccaaggcccgcgccgccatccagaagttcgaggatgcatccgcatcgtacgctgcgcaggccgccgtgcgcgacgtgaagcagggcgatgccgtctcgctggtgttcggccgtgccgccaacaagcaggtgctgtcgggcaacgtgctgagcatcgagaatgcgaagaccggcctgctgttcaccgtgctgaccggcaccggcgctgcatccaaggtcgtcaacgtcggcgccgatgcgctgctgctgtccccggaagccgtgaccgccgccgaggaaagcatcctcgttgccaagctggaagccgagcaggaagctgccgccaaggctgcggccgaagacgctgccaagggtgaaaccccggccgcgtaacatctgattgcggtgtcctcttgtaatgagagggcactgcgatgtacactg

SEQ ID NO: 57 - protein, 834 aa, unidentified
  REGION 1..834: note = the amino acid sequence of tail tubular protein B of abacteriophage
MAKAGGTYPDILQGVSQKPAHRRRAGQTHEQINVLSDPVNGLVRRRGTRFAAAQAVVTSAELRNMDVFDFMQEGKEYALLYRRDASSSSSATFAFLYNKTDEAFIPLVYENSTWVNTLVSGGASSLAAIGSYVYIAGNTTIPSATSTNVWQEQTNIQRLAAWVRTGKYNTTYTVNLTRTDNTVLTVTFKTVTASYPGTLDTSDIPFYLPGGTEPDAAYQKHVNDRVNEYNSAVNEWIVTSAEQTRPEYIAEKLSDLLVDAGVSSTYIKGGIVIDDDQFKDITVDDEGDGTTFYAAGQEITDATYAVKFHWHGKIIRVRPSGAGADETYYLRAELENGETSGYGSVDWYEAPGVECTIDNLVSQLYIYNGVGYIARNGAGLTSLAPGSGAHPAYGSRVAGDGLTSPIPWFVGKPITMLSVFQDRLIVGAQNYVNASRSADYLNFWRGSAVTIEDSDPIEIFAHGSEGDVLRHGTLYNGNLVIFGDRQQYGISGDSVFSPKNPLIKAFSANKDSVDAKAQTSGNYIFYAQYGSEGTSLHQMRVGALNGQQTVTDEMSNELDSWLSGTPLQITALTAPNLVMFRTREHPQDFYLYRYEDNKNNGQRIVDAWSKFQYHPALGEIIGISSYKKNGLVFTARGSLVACDVFDPKGEPDSHACLDSWARFGTPTGVLTASASIAVNKTSPYFLLGCPYAQASDFLTQFDDLDADALEYGVVSEALVIPTNPFPRDQNGQAVLDGRMSLNKVTVDVEDTAGMLASVTTRNGSMTTTDFEGRILGDSDNLIARQPVYRGQLNISVGREVRECTYEIRSKDWLPLRVTGLSWTGQTFNNVRRVS

SEQ ID NO: 58 - DNA, 2505 bp, unidentified
  misc_feature 1..2505: note = the nucleotide sequence encoding amino acid sequence of tailtubular protein B of a bacteriophage
  source 1..2505: mol_type = unassigned DNA
atggcaaaggcaggcggaacctatcccgacatcctacagggtgtcagtcagaaaccggcgcatcgtcgtcgggcgggtcagacgcacgagcagatcaacgtgctgtccgatccggtgaatggcctcgtgcgccgtcgcggtacgcggttcgctgctgcccaagccgttgtcacctcggccgaactgcgcaacatggacgtgttcgatttcatgcaggagggcaaggagtacgcgctgctgtatcggcgcgacgcctcgtcgtccagcagtgcgacgttcgcgttcctctacaacaagacggacgaggcgttcatcccgttggtctacgagaacagcacgtgggtcaacacgttggtcagcggcggcgcgtcctctctcgcggccatcggcagctacgtctacatcgcgggcaacaccacgatcccctcggccaccagcaccaacgtgtggcaggagcagacgaacatccagcgcctcgccgcgtgggtgcgcaccggcaagtacaacaccacgtacacggtgaacctgacgcgcacggacaacacggtgctgacggtgacgttcaagacggtgaccgcgtcgtaccccggcacgctcgacacgagcgacatcccgttctacctgcccggcggcacggagccggacgcggcgtaccagaagcacgtcaacgaccgagtgaacgagtacaactccgcggtcaacgagtggatcgtgaccagcgccgagcagacgcgcccggagtacatcgcggagaagctgtcggatttgctggtggacgcaggagtatcttcgacgtacatcaagggcggtatcgtcattgacgacgaccagttcaaggacatcacggttgacgacgagggcgacggcacgaccttctacgccgcagggcaggagattaccgacgcgacctacgctgtcaagttccactggcacggcaagatcatccgcgtgcgcccaagcggtgcaggtgctgacgagacgtactacctgcgcgccgagttggagaacggcgagacttctggctacggttcggtggattggtacgaagcgcctggcgtggagtgcaccatcgacaacctcgtgtcgcagctgtacatctacaacggtgtgggctacatcgcacgcaacggtgcgggcctcacgtccctggctccgggcagcggcgcacacccggcttacggttcgcgcgtcgcaggcgatggtctgacctcgccgatcccgtggttcgtcggcaagccgatcacgatgctgtccgtcttccaagaccggctgatcgttggcgcgcagaactacgtcaatgcgtcccgctcggcggactacctgaacttctggcgcggctctgccgtaaccatcgaagacagcgaccccatcgaaatcttcgcgcacggtagcgagggcgacgtgctccggcacggtacgctctacaacggcaacctcgtgatcttcggtgaccggcagcagtacggcatcagcggcgactcggtgttcagtccgaagaacccgctcatcaaggcgttcagtgcgaacaaggattcggtggacgcaaaggcgcagacctcgggcaactacatcttctacgcgcagtacggcagcgaaggtacgagcctgcaccagatgcgcgtcggcgcactcaacgggcagcagacggttacggacgagatgtccaacgagctggactcgtggctgtcgggcacgccgttgcagatcaccgcactcaccgcaccgaacctcgtgatgttccgcacgcgagagcacccgcaggacttctacctgtaccggtacgaggacaacaagaacaacgggcagcgcatcgtggacgcttggtcgaagttccagtaccacccggcgctgggcgaaatcatcggcatcagcagctacaagaagaacggcctcgtgttcaccgcgcgcggatcgctggtggcgtgcgacgtgttcgatccgaagggcgagccggactcgcatgcgtgcctcgatagctgggcgcgtttcggtacacctacaggcgtactgaccgcgagcgcgagcatcgccgtcaacaagactagcccgtacttcctgctgggttgtccctacgctcaggcgtccgacttccttacccagttcgatgacctcgacgctgatgcgttggagtatggcgtggtgtccgaggcgctggtgattccgaccaatccgttccctcgggaccagaacgggcaggctgtgctcgacggccgcatgtcgctgaacaaggtgacggtggacgtggaggacacggcgggcatgctcgcttcggttaccacccgcaacgggagcatgaccaccactgacttcgagggccgcatcctcggcgactccgacaacctgatcgcgcggcaaccggtgtaccgggggcagctgaacatcagcgtcgggcgcgaagtgcgcgagtgcacctacgagattcgcagcaaggattggctcccgctccgggtgaccggcctcagctggacgggtcagactttcaacaatgtacggagggttagctaa

SEQ ID NO: 59 - protein, 847 aa, unidentified
  REGION 1..847: note = the amino acid sequence of tail tubular protein B of abacteriophage
  VARIANT 61: note = Xaa is Thr or Ala
  VARIANT 108: note = Xaa is Gln or Lys
  VARIANT 404: note = Xaa is Pro or Gln
  VARIANT 679: note = Xaa is Pro or Ser
  VARIANT 682: note = Xaa is Thr or Ala
  VARIANT 727: note = Xaa is Ile or Val
MSKTVGSLPSLVQGVSEQEPHNRAPGQMWESVNMIDSPTKGKARRRGTVYSDHIELPSAIXAALVEARSQTEYTFIIDGREYSLIYRSRASTLGKDYFAQLLDKESGXFFDIVYEGSTWIDNLISGGVSAIACIGRYVYIAGNTTLPRATSTESWNSPDNLQKLAAWVREGAYSRKFTLVLYHVNGTKVEFAYTTLAAAYPELLDTTDIPFYKPGSNPQTADPEYQKRVNDRVNAYEGEKTAWIRKAAEDIVPANIAAKLAELAAQAGIIASSIGPCVVVDDPNYNDIRLLDDASNTLVSYAGREVSDPQFVTLYHWAGKIVRVRPSGGGDKESYYLKAVALEEGAVGWTKVEWVETAGVVHEIHNVVSQMVIDPALKTAYIAQNGEGLKSLAPQLGDHPVYKXNVVGDAVTAPLPHYFGRVITCMTVFQDRLMISADNIVNFSRSSDYLNFFRVTILNIQDNDPIEIFAHGSEGDTIKRAVMFERDLVLFGELRQYAINGREFLSPTNPNINVIGNFEGGVRAQPIASGNFLFFGKHANERTGLHQMQPGETAQTTIVYDVSQVLDTWLTGEPVQLLGTTMPNMITYRTDADPSIWYTYRYADEQGTGRVMASWGKQQYAPELGTVAAITHYRGDLFVITLRSAGGKDYWFADKLSLNVDMPRYPHLDSQVRYGQETXWHXAAASKLYVAADKSSDYFLLGAPRAGAAEFVEQAPGVESALVVGSXSPAYFQPTNPYMRDSQGLPILNGRITLTSFGFHLADTGGLRAYVLKPDRERTLLFEGRVIGHSSNIIGRQPVFSGIRTVSVGRETRTCIIELRSEDWQPLRVTGAEWSGQVFMPRARGLY

SEQ ID NO: 60 - protein, 205 aa, unidentified
  REGION 1..205: note = the amino acid sequence of tail tubular protein A of abacteriophage
  VARIANT 28: note = Xaa is Glu or Asp
  VARIANT 108: note = Xaa is Ser or Asn
  VARIANT 110: note = Xaa is Gln or His
  VARIANT 153: note = Xaa is Gln or Lys
  VARIANT 157: note = Xaa is Asp or Asn
  VARIANT 189: note = Xaa is Tyr or Phe
  VARIANT 201: note = Xaa is Val or Tyr
MAFITKLDIVNACIKTMGETKLNTLEXDHVYKDDAVDLIDRVHRDVSSLALWFNTEWVELKPQATSKYIMVPTDVLKLDCNPSRFGHVVQRGRRLYDRKRNTYEFDHXVXAKLVRLLDFDDLPYEVQMFVRDDSVLRFQSDFDGDNTKYAKIXQQRXDSWINLKAEHIRQIKANPLFARASVDVLRQRXFNYSGHPWHSHXTFPG

SEQ ID NO: 61 - protein, 834 aa, unidentified
  REGION 1..834: note = the amino acid sequence of tail tubular protein B of abacteriophage
  VARIANT 25: note = Xaa is Ala or Pro
  VARIANT 53: note = Xaa is Ala or Ser
  VARIANT 216: note = Xaa is Ala or Pro
  VARIANT 221: note = Xaa is His or Tyr
  VARIANT 272: note = Xaa is Val or Ile
  VARIANT 389: note = Xaa is Ala or Glu
  VARIANT 395: note = Xaa is Ser or Ala
  VARIANT 410: note = Xaa is Val or Ile
  VARIANT 425: note = Xaa is Ile or Val
  VARIANT 472: note = Xaa is Gly or Ala
  VARIANT 607: note = Xaa is Ala or Ser
  VARIANT 623: note = Xaa is Ile or Val
  VARIANT 662: note = Xaa is Arg or Ser
  VARIANT 670: note = Xaa is Leu or Gln
  VARIANT 699: note = Xaa is Thr or Asn
  VARIANT 707: note = Xaa is Asp or Gly
  VARIANT 757: note = Xaa is Ser or Ala
  VARIANT 763: note = Xaa is Gly or Ser
  VARIANT 764: note = Xaa is Ser or Asn
  VARIANT 765: note = Xaa is Met or Val
MAKAGGTYPDILQGVSQKPAHRRRXGQTHEQINVLSDPVNGLVRRRGTRFAAXQAVVTSAELRNMDVFDFMQEGKEYALLYRRDASSSSSATFAFLYNKTDEAFIPLVYENSTWVNTLVSGGASSLAAIGSYVYIAGNTTIPSATSTNVWQEQTNIQRLAAWVRTGKYNTTYTVNLTRTDNTVLTVTFKTVTASYPGTLDTSDIPFYLPGGTEPDXAYQKXVNDRVNEYNSAVNEWIVTSAEQTRPEYIAEKLSDLLVDAGVSSTYIKGGIXIDDDQFKDITVDDEGDGTTFYAAGQEITDATYAVKFHWHGKIIRVRPSGAGADETYYLRAELENGETSGYGSVDWYEAPGVECTIDNLVSQLYIYNGVGYIARNGAGLTSLAPGSGXHPAYGXRVAGDGLTSPIPWFXGKPITMLSVFQDRLXVGAQNYVNASRSADYLNFWRGSAVTIEDSDPIEIFAHGSEGDVLRHXTLYNGNLVIFGDRQQYGISGDSVFSPKNPLIKAFSANKDSVDAKAQTSGNYIFYAQYGSEGTSLHQMRVGALNGQQTVTDEMSNELDSWLSGTPLQITALTAPNLVMFRTREHPQDFYLYRYEDNKNNGQRIVDXWSKFQYHPALGEIIGXSSYKKNGLVFTARGSLVACDVFDPKGEPDSHACLDSWAXFGTPTGVXTASASIAVNKTSPYFLLGCPYAQASDFLXQFDDLDAXALEYGVVSEALVIPTNPFPRDQNGQAVLDGRMSLNKVTVDVEDTAGMLAXVTTRNXXXTTTDFEGRILGDSDNLIARQPVYRGQLNISVGREVRECTYEIRSKDWLPLRVTGLSWTGQTFNNVRRVS

1. A bacteriolytic agent consisting of a bacteriophage comprising, in a genomic DNA:
a gene consisting of an amino acid sequence of any one of the following (a) to (c); and
a gene consisting of an amino acid sequence of any one of the following (d) to (f),
wherein the genes are respectively a gene encoding a tail tubular protein A and a gene encoding a tail tubular protein B, both protein A and protein B having a recognizing ability for target bacteria:
(a) an amino acid sequence of SEQ ID NO: 24, 49, or 60;
(b) an amino acid sequence having addition, deletion, and/or substitution of one or a plurality of amino acids in the amino acid sequence of SEQ ID NO: 24 or 49;
(c) an amino acid sequence having a sequence identity of 97% or more to the amino acid sequence of SEQ ID NO: 24 or 49;
(d) an amino acid sequence of SEQ ID NO: 57, 50, or 61;
(e) an amino acid sequence having addition, deletion, and/or substitution of one or a plurality of amino acids in the amino acid sequence of SEQ ID NO: 57 or 50; or
(f) an amino acid sequence having a sequence identity of 97% or more to the amino acid sequence of SEQ ID NO: 57 or 50.

2. A bacteriolytic agent consisting of a bacteriophage comprising, in a genomic DNA, a gene encoding a tail fiber protein having a recognizing ability for target bacteria, wherein the protein consists of amino acid sequence of any one of the following (g) to (j):
(g) an amino acid sequence of any one selected from the group consisting of SEQ ID NOs: 1, 11, 45, 15, and 42;
(h) an amino acid sequence having addition, deletion, and/or substitution of one or a plurality of amino acids in the amino acid sequence of any one selected from the group consisting of SEQ ID NOs: 1, 11, 15, and 42;
(i) an amino acid sequence having a sequence identity of 90% or more to the amino acid sequence of any one selected from the group consisting of SEQ ID NOs: 1, 11, 15, and 42; or
(j) an amino acid sequence having substitution of one amino acid other than at positions 278 and 350 in the amino acid sequence of SEQ ID NO: 11.

3. A bacteriolytic agent consisting of a bacteriophage comprising, in a genomic DNA:
a gene consisting of an amino acid sequence of any one of the following (k) to (m); and
a gene consisting of an amino acid sequence of any one of the following (n) to (p),
wherein the genes are respectively a gene encoding a tail tubular protein A and a gene encoding a tail tubular protein B, both protein A and protein B having a recognizing ability for target bacteria:
(k) an amino acid sequence of SEQ ID NO: 37;
(l) an amino acid sequence having addition, deletion, and/or substitution of one or a plurality of amino acids in the amino acid sequence of SEQ ID NO: 37;
(m) an amino acid sequence having a sequence identity of 92% or more to the amino acid sequence of SEQ ID NO: 37;
(n) an amino acid sequence of SEQ ID NO: 38, 54, or 59;
(o) an amino acid sequence having addition, deletion, and/or substitution of one or a plurality of amino acids in the amino acid sequence of SEQ ID NO: 38 or 54; or
(p) an amino acid sequence having a sequence identity of 92% or more to the amino acid sequence of SEQ ID NO: 38 or 54.

4. A bacteriolytic agent consisting of a bacteriophage comprising, in a genomic DNA, a gene encoding a protein consisting of an amino acid sequence of any one of the following (q) to (s):
(q) an amino acid sequence of SEQ ID NO: 21;
(r) an amino acid sequence having addition, deletion, and/or substitution of one or a plurality of amino acids in the amino acid sequence of SEQ ID NO: 21; or
(s) an amino acid sequence having a sequence identity of 90% or more to the amino acid sequence of SEQ ID NO: 21.

5. A bacteriolytic agent consisting of a bacteriophage having a genomic DNA sequence comprising a nucleotide sequence of any one of the following (1′) to (3′):
(1′) a nucleotide sequence of any one selected from the group consisting of SEQ ID NOs: 14, 18, 19, and 32 to 36;
(2′) a nucleotide sequence having addition, deletion, and/or substitution of one or a plurality of nucleotides in the nucleotide sequence of any one selected from the group consisting of SEQ ID NOs: 14, 18, 19, and 32 to 36; or
(3′) a nucleotide sequence having a sequence identity of 90% or more to the nucleotide sequence of any one selected from the group consisting of SEQ ID NOs: 14, 18, 19, and 32 to 36.

6. The bacteriolytic agent according to claim 1, wherein a nucleotide sequence of the genomic DNA consists of a nucleotide sequence of any one of the following (4′) to (8′):
(4′) a nucleotide sequence of SEQ ID NO: 28, 29, or 53;
(5′) a nucleotide sequence having addition, deletion, and/or substitution of one or a plurality of nucleotides in the nucleotide sequence other than the gene according to claim 1 within the nucleotide sequence of SEQ ID NO: 28, 29, or 53;
(6′) a nucleotide sequence having a sequence identity of 95% or more to the nucleotide sequence other than the gene according to claim 1 within the nucleotide sequence of SEQ ID NO: 28, 29, or 53;
(7′) the nucleotide sequence having addition, deletion, and/or substitution of one or a plurality of nucleotides in the nucleotide sequence of SEQ ID NO: 28, 29, or 53; or
(8′) a nucleotide sequence having a sequence identity of 95% or more to the nucleotide sequence of SEQ ID NO: 28, 29, or 53.

7. The bacteriolytic agent according to claim 1, wherein the bacteriolytic agent exhibits bacteriolytic ability against bacteria of Xanthomonas genus.

8. A composition comprising one or more of the bacteriolytic agents according to claim 1 as an active component(s).

9. A composition comprising two or more of the bacteriolytic agents according to claim 1 as active components.

10. A composition for plant disease control, comprising the composition according to claim 8.

11. A method for controlling plant disease, comprising a contacting step of contacting the composition for plant disease control according to claim 9 to a target plant.

12. A method for identifying bacteria of Xanthomonas genus, comprising:
a culturing step of culturing subject bacteria isolated from a plant tissue affected by a plant disease, to obtain a culture preparation;
